(19) United States
(12) Patent Application Publication
(10) Pub. No.: US 2004/0102413 A1
(43) Pub. Date: May 27, 2004

(54) Method and reagent for the inhibition of telomerase enzyme

(75) Inventors: James McSwiggen, Boulder, CO (US); Bharat M. Chowrira, Louisville, CO (US); Dan T. Stinchcomb, Ft. Collins, CO (US)

Correspondence Address: MCDONNELL BOEHNEN HULBERT & BERGHOFF LLP, 300 S. WACKER DRIVE, 32ND FLOOR, CHICAGO, IL, 60606, US

(73) Assignee: Sirna Therapeutics, Inc., Boulder, CO (US)

(21) Appl. No.: 10/712,672

(22) Filed: Nov. 13, 2003

Related U.S. Application Data
(63) Continuation of application No. 09/653,225, filed on Aug. 31, 2000.
(60) Provisional application No. 60/151,713, filed on Aug. 31, 1999.
(60) Provisional application No. 60/197,769, filed on Apr. 14, 2000.

(51) Int. Cl. A61K 48/00; C07H 21/02

(52) U.S. Cl. 514/44; 536/23.1

(57) ABSTRACT

The present invention relates to nucleic acid molecules which modulate the synthesis, expression and/or stability of an RNA encoding one or more protein subunits of telomerase enzyme.

[0001] This application is a continuation of U.S. application Ser. No. 09/653,225 filed Aug. 31, 2000 which claims the benefit of U.S. Provisional Application No. 60/151,713 filed on Aug. 31, 1999 and U.S. Provisional Application No. 60/197,769 filed on Apr. 14, 2000. All of the applications are incorporated by reference herein in their entireties, including the drawings.

[0002] The Sequence Listing file named “MBHBOO,882-C SequenceListing.txt” (1,187,852 bytes in size) submitted in duplicate on Compact Disc-Recordable (CD-R) medium (“010913_{—}1300”) in compliance with 37 C.F.R. §1.52(e) is incorporated herein by reference.

### BACKGROUND OF THE INVENTION

[0003] The present invention concerns compounds, compositions, and methods for the study, diagnosis, and treatment of conditions and diseases related to the level of telomerase enzyme.

[0004] The following is a brief description of the current understanding in the biology of telomerase and its components. The discussion is not meant to be complete and is provided only for understanding of the invention that follows. The summary is not an admission that any of the work described below is prior art to the claimed invention.

[0005] The ribonucleoprotein enzyme telomerase consists of an RNA template subunit and one or more protein subunits including telomerase reverse transcriptase (TERT), which function together to direct the synthesis of telomeres. Telomeres exist as non-nucleosome DNA/protein complexes at the physical ends of eukaryotic chromosomes. These capping structures maintain chromosome stability and replicative potential (Zakian, V. A., 1995, Science, 270, 1601-1607). Telomere structure is characterized by tandem repeats of conserved DNA sequences rich in G-C base pairs. Additional conserved telomere elements include a terminal 3′-overhang in the G-rich strand and non-histone structural proteins that are complexed with telomeric DNA in the nucleus. (Blackburn, “E., 1990, JBC., 265, 5919-5921.). Observed shortening of telomeres coincides with the onset of cellular senescence in most somatic cell lines lacking significant levels of telomerase. This finding has had a profound impact on our views concerning the mechanisms of aging, age related disease, and cancer.

[0006] Conventional DNA polymerases are unable to fully replicate the ends of linear chromosomes (Watson, J. D., 1972, Nature, 239, 197-201). This inability stems from the 3′ G-rich overhang that is a product of ribonuclease cleavage of the RNA primer used in DNA replication. The overhang prevents DNA polymerase replication since the recessed C-rich parent strand cannot be used as a template. Telomerase overcomes this limitation by extending the 3′ and of the chromosome using deoxyribonucleotides as substrates and a sequence within the telomerase RNA subunit as a template. (Lingner, J., 1995, Science, 269, 1533-1534). As such, telomerase is considered a reverse transcriptase that is responsible for telomere maintenance.

[0007] Telomerase was first discovered by in Tetrahymena thermophila in 1985 (Greider, C. W., 1995, Cell, 43, 405-413). The RNA subunits and their respective genes were later discovered and characterized in protozoa, budding yeast, and mammals. Genetic studies of these genes confirmed the role of telomerase RNA (TR) in determining telomere sequence by mutating genes which encode the telomeric RNA (Yu, G. L., 1990, Nature, 344, 126-132), (Singer, M. S., 1994, Science, 266, 404-409), (Blasco, M. A., 1995, Science, 269, 1267-1270). These studies showed that telomerase activity parallels TR expression in protozoa, yeast and mice. However, the expression of human telomerase RNA (hTR) does not correlate well with telomerase activity in mammalian cells. Many human tissues express hTR but are devoid of telomerase activity (Feng, J., 1995, Science, 269, 1236-1241). Knockout mice, in which the mTR gene has been deleted from germline cells, have been shown to be viable for at least six generations. Cells from later generations of these mice showed chromosomal abnormalities consistent with telomere degradation, indicating that mTR is necessary for telomere length maintenance, but is not required for embryonic development, oncogenic transformation, or tumor formation in mice (Blasco, M. A., 1997, Cell, 91, 25-34).

[0008] The first catalytically active subunit of telomerase (p123) was isolated from Euplotes aediculatus along with another subunit (p43) and a 66-kD RNA subunit (Linger, J., 1996, Proc. Natl. Acad. Sci., 93, 10712-10717). Subsequent studies revealed telomerase catalytic subunit homologs from fission yeast (Est2p) and human genes (TRT1). The human homolog, TRT1 encoding hTERT, expressed mRNA with a strong correlation to telomerase activity in human cells (Nakamura, T. M., 1997, Science, 277, 955-959). Reconstitution of telomerase activity with in vitro transcribed and translated hTERT and hTR, either co-synthesized or simply mixed, demonstrated that hTERT and hTR represent the minimal components of telomerase. Furthermore, transient expression of hTERT in normal diploid human cells restored telomerase activity, demonstrating that hTERT is the only component necessary to restore telomerase activity in normal human cells (Weinrich, S. L., 1997, Nature Genetics, 17, 498-502). The introduction of telomerase into normal human cells using hTERT expression via transfection has resulted in the extension of life span in these cells. Such findings indicate that telomere loss in the absence of telomerase is the “mitotic clock” that controls the replicative potential of a cell prior to senescence (Bodnar, A. G., 1998, Science, 279, 349-352).

[0009] Expression of telomerase is observed in germ cell and most cancer cell lines. These “immortal” cell lines continue to divide without shortening of their telomeres (Kim, N. W., 1994, Science, 266, 2011-2015). A model of tumor progression has evolved from these findings, suggesting a role for telomerase expression in malignant transformation. Successful malignant transformation in human cells was accomplished for the first time by ectopic expression of hTERT in combination with two oncogenes, SV40 large-T and H-ras. Injection of nude mice with cells expressing these oncogenes and hTERT resulted in rapid growth of tumors. These observations indicate that hTERT mediated telomere maintenance is essential for the formation of human tumor cells (Hahn, W. C., 1999, Nature, 400, 464-468).

[0010] Various methods have been developed to assay telomerase activity in vitro. The most widely used method to characterize telomerase activity is the telomeric repeat amplification protocol (TRAP). TRAP utilizes RT-PCR of cellular extracts to measure telomerase activity by making the amount of PCR target dependant upon the biochemical activity of the enzyme (Kim, N. W., 1997, Nucleic Acids Research, 25, 2595-2597).

[0011] A variety of animal models have been designed to assay telomerase activity in vivo. Inhibition of telomerase activity has been analyzed in rats via cell proliferation studies with MNU (N-methyl-N-nitosurea) induced mammary carcinomas in response to treatment with 4-(hydroxyphenyl)retinamide (4-HPR), a known inhibitor of mammary carcinogenesis in animal models and premenopausal women (Bednarek, A., 1999, Carcinogenesis, 20, 879-883). Additional studies have focused on the up-regulation of telomerase in transformed cell lines from animal and human model systems (Zhang, P. B., 1998, Leuk. Res., 22, 509-516), (Chadeneau, C., 1995, Oncogene, 11, 893-898), (Greenberg, R., 1999, Oncogene, 18, 1219-1226).

[0012] Human cell culture studies have been established to assay inhibition of telomerase activity in human carcinomas responding to various therapeutics. A human breast cancer model for studying telomerase inhibitors is described (Raymond, E., 1999, Br. J. Cancer, 80, 1332-1341). Human studies of telomerase expression as related to various other cancers are described including cervical cancer (Nakano, K., 1998, Am. J. Pathol, 153, 857-864), endometrial cancer (Kyo, S., 1999, Int. J. Cancer, 80, 60-63), meningeal carcinoma (Kleinschmidt-DeMasters, B. K., 1998, J. Neurol. Sci., 161, 124-134), lung carcinoma (Yashima, K., 1997, Cancer Reseach, 57, 2372-2377), testicular cancer in response to cisplatin (Burger, A. M., 1997, Eur. J. Cancer, 33, 638-644), and ovarian carcinoma (Counter, C. M., 1994, Proc. Natl. Acad. Sci., 91, 2900-2904).

[0013] Particular degenerative and disease states that can be associated with telomerase expression modulation include but are not limited to:

[0014] Cancer: Almost all human tumors have detectable telomerase activity (Shay, J. W., 1997, Eur. J. Cancer, 33, 787-791). Treatment with telomerase inhibitors may provide effective cancer therapy with minimal side effects in normal somatic cells that lack telomerase activity. The therapeutic potential exists for the treatment of a wide variety of cancer types.

[0015] Restinosis: Telomerase inhibition in vascular smooth muscle cells may inhibit restinosis by limiting proliferation of these cells.

[0016] Infectious disease: Telomerase inhibition in infectious cell types that express telomerase activity may provide selective anti-infectious agent activity. Such treatment may prove especially effective in protozoan-based infection such as Giardia and Lesh Meniesis.

[0017] Transplant rejection: Telomerase inhibition in endothelial cell types may demonstrate selective immunnosuppressant activity. Activation of telomerase in transplant cells could benefit grafting success through increased proliferative potential.

[0018] Autoimmune disease: Telomerase modulation in various immune cells may prove beneficial in treating diseases such as multiple sclerosis, lupus, and AIDS.

[0019] Age related disease: Activation of telomerase expression in cells at or nearing senescence as a result of advanced age or premature aging could benefit conditions such as macular degeneration, skin ulceration, and rheumatoid arthritis.

[0020] The present body of knowledge in telomerase research indicates the need for methods to assay telomerase activity and for compounds that can regulate telomerase expression for research, diagnostic, trait alteration, animal health and therapeutic use.

[0021] Gaeta et al., U.S. Pat. Nos. 5,760,062; 5,767,278; 5,770,613 have described small molecule inhibitors of human telomerase RNA (hTR) subunit.

[0022] Blasco et al., 1995, Science, 269, 1267-1270 describe the synthesis and testing of antisense oligonucleotides targeted against a specific region of the mouse telomerase RNA (mTR) subunit and reported reduction in telomerase activity in mice.

[0023] Bisoffi et al., 1998, Eur. J. Cancer, 34, 1242-1249 have studied the down regulation of human telomerase activity by a retrovirus vector expressing antisense RNA targeted against the hTR RNA.

[0024] Norton et al., 1996, Nature Biotechnology, 14, 615-619 have reported the use of a peptide nucleic acid (PNA) molecule targeting hTR RNA to down regulate telomerase activity in human immortal breast epithelial cells.

[0025] Yokoyama et al., 1998, Cancer Research, 58, 5406-5410 have reported the synthesis and testing of hammerhead ribozyme constructs targeting hTR RNA resulting in a decrease in the telomerase activity in Ishikawa cells.

[0026] Henderson, European Patent Application No. 666,313-A2 describes methods of identifying and cloning hTR gene for use in gene therapy approaches for creating aberrant telomeric sequences in transfected human tumor cells. A ribozyme based gene therapy approach to inhibit the expression of hTR gene is described as well. The intended result of such therapies involves incurred genetic instability based on non-native telomeric sequences resulting in rapid cell death of the treated cells.

[0027] West et al., U.S. Pat. No. 5,489,508 describe methods for determining telomere length and telomerase activity in cells. Inhibitors of hTR RNA, including oligonucleotides and/or small molecules are described.

[0028] These foregoing approaches of targeting the telomerase RNA subunit (TR) may not be very beneficial, because as demonstrated by Feng et al., (Feng, J., 1995, Science, 269, 1236-1241), telomerase activity in humans does not correlate well to hTR concentration.

[0029] Collins et al., International PCT publication No. WO 98/01542 describes assays for the detection of telomerase activity. Four human telomerase subunit proteins are described called p140, p105, p48 and p43. In addition, hybridization probes and primers are described as inhibitors of telomerase gene function. Antibody based inhibitors of telomerase protein subunits are described.

[0030] A more attractive approach to telomerase regulation would involve the regulation of human telomerase by modulating the expression of the protein subunits of the enzyme, preferably the reverse transcriptase (hTERT) subunit. Based of reconstitution experiments, hTERT and hTR represent the minimal components of telomerase. Since hTR expression does not correlate well with telomerase activity in human cells and since many human cells express hTR without telomerase activity, targeting hTERT may prove more beneficial than targeting hTR. hTERT is the only component necessary to restore telomerase activity in normal human cells. A study in which the three major subunits of telomerase (hTR, TP1, and hTERT were assayed in normal and malignant endometrial tissues determined that hTERT is a rate limiting determinant of enzymatic activity of human telomerase (Kyo, S., 1999, Int. J. Cancer, 80, 60-63). Additional protein subunits that have been isolated most likely serve only a structural role in telomerase activity, but may be important in enhancing the activity of the telomerase enzyme. As such, hTERT is one of the better targets for the ectopic regulation of telomerase activity.

[0031] Cech et al., International PCT publication No. WO 98/14593 describe compositions and methods related to hTERT for diagnosis, prognosis and treatment of human diseases, for altering proliferative capacity in cells and organisms, and for screening compounds and treatments with potential use as human therapeutics.

[0032] Cech et al., International PCT publication No. WO 98/14592 describe nucleic acid and amino acid sequences encoding various telomerase protein subunits and motifs of Euplotes aediculatus, and related sequences from Schizosaccharomyces, Saccharomyces sequences, and human telomerase. The polypeptides comprising telomeric subunits and functional polypeptides and ribonucleoproteins that contain these subunits are described as well. Cech et al., International PCT Publication No. WO 98/14592, mentions in general terms the the possibility of using antisense and ribozymes to down regulate the expression of human telomerase reverse transcriptase enzyme.

### SUMMARY OF THE INVENTION

[0033] The invention features novel nucleic acid-based techniques [e.g., enzymatic nucleic acid molecules (ribozymes), antisense nucleic acids, 2-5A antisense chimeras, triplex DNA, antisense nucleic acids containing RNA cleaving chemical groups (Cook et al., U.S. Pat. No. 5,359,051)] and methods for their use to down regulate or inhibit the expression of telomerase enzyme.

[0034] In a preferred embodiment, the invention features use of one or more of the nucleic acid-based techniques to inhibit the expression of the genes encoding the protein subunits of the telomerase enzyme, preferably the catalytic subunit of the telomerase enzyme. Specifically, the invention features the use of nucleic acid-based techniques to specifically inhibit the expression of telomerase reverse transcriptase (TERT) gene.

[0035] In another preferred embodiment, the invention features the use of an enzymatic nucleic acid molecule, preferably in the hammerhead, NCH, G-cleaver and/or DNAzyme motif, to inhibit the expression TERT gene.

[0036] In another preferred embodiment, the invention features the inhibition or down regulation of telomerase activity by inhibiting or down regulating the expression of one or more activators of telomerase enzyme, such as protein encoded by ras gene. Such activator gene expression may be regulated by the use of nucleic acid-based techniques, such as enzymatic nucleic acid molecules and antisense oligonucleotides.

[0037] By “inhibit” it is meant that the activity of telomerase enzyme or level of RNAs or equivalent RNAs encoding one or more protein subunits of the telomerase enzyme is reduced below that observed in the absence of the nucleic acid. In one embodiment, inhibition with enzymatic nucleic acid molecule preferably is below that level observed in the presence of an enzymatically inactive or attenuated molecule that is able to bind to the same site on the target RNA, but is unable to cleave that RNA. In another embodiment, inhibition with antisense oligonucleotides is preferably below that level observed in the presence of for example, an oligonucleotide with scrambled sequence or with mismatches. In another embodiment, inhibition of TERT genes with the nucleic acid molecule of the instant invention is greater than in the presence of the nucleic acid molecule than in its absence. According to the invention, the activity of telomerase enzyme or the level of RNA encoding one or more protein subunits of the telomerase enzyme is inhibited if it is at least 10% less, 20% less, 50% less, 75% less or even not active or present at all, in the presence of a nucleic acid of the invention relative to the level in the absence of such a nucleic acid.

[0038] As used herein, the term “telomerase activity” refers to enzyme activity that replicates, for example, the TTAGGG repeats at the ends of linear chromosomes. Telomerase activity is comprised by a ribonucleoprotein enzyme comprising one or more protein subunits and an RNA subunit. The enzymatic activity extends the 5′-recessed end of a linear chromosome using deoxyribonucleotides and an RNA sequence within the RNA subunit as a primer. Telomerase activity may be assayed as follows. Samples to be assayed for telomerase activity are prepared by extraction into CHAPS lysis buffer (10 mM Tris pH 7.5, 1 mM MgCl₂, 1 mM EGTA, 0.1 mM PMSF, 5mM -mercaptoethanol, 1 mM DTT, 0.5% 3-[(3-cholamidopropyl)-dimethyl-amino]-1- propanesulfonate (CHAPS), 10% glycerol and 40 U/ml RNAse inhibitor (Promega, Madison, Wis., U.S.A.). Cells are suspended in CHAPS lysis buffer and incubated on ice for 30 minutes, which allows lysis of 90-100% of cells. Lysate is then transferred to polyallomer centrifuge tubes and spun at 100,000×g for 1 hour at 4 degrees C. The supernatant is the protein extract, and concentration ranges of 4-10 μg/μl are suitable for telomerase assay. Extracts may be concentrated if necessary using a Microcon Microfilter 30 (Amicron, Beverly, Mass. U.S.A.) according to the manufactureris instructions. Extracts may be stored frozen at −80 degrees C. until assayed.

[0039] Telomerase may be assayed according to Kim and Wu, Nucl. Acids Res. 25: 2595-2597, incorporated herein by reference. Briefly, for the telomerase assay, 2 μg of protein extract is used. The extract is assayed in 50 μl of reaction mixture containing 0.1 μg TS substrate primer (5′-MTCCGTCGAGCAGAGTT-3′ (SEQ. ID. NO. 5569) end-labeled using alpha-³²P-ATP and T4 polynucleotide kinase)(SEQ. ID. NO. 5570) 0.1 μg ACX return primer (5′-GCGCGG[CTTACC]₃ CTAACC-3′), 0.1 μg NT internal control primer (5′-ATCGCTTCTCGGCCTTTT-3′) (SEQ. ID. NO. 5571) 0.01 micromol TSNT internal control template (5′-MTCCGTCGAGCAGAGTTAAAAGGCCGAGMCGAT-3′) (SEQ. ID. No. 5572) 50 μM each deoxynucleoside triphosphate, 2 U of Taq DNA polymerase, and 2 μl CHAPS protein extract, all in 1×TRAP buffer (20 mM Tris (pH 8.3), 68 mM KCl, 1.5 mM MgCl₂, 1 mM EGTA, 0.05% Tween 20). Each reaction is placed in a thermocycler block preheated to 30 C and incubated at 30 C for 10 minutes, then cycled for 27 cycles of 94 degrees C. for 30 seconds, 60 degrees C. for 30 seconds. Reaction products are separated on a denaturing 8% polyacrylamide gel, followed by drying of the gel and autoradiography. The internal control (to control for possible Taq polymerase inhibition) generates a band of 36 nt. Comparison of radioactive signal integrated (e.g., by phorphorimager analysis) for telomerase-extended bands with the radioactive signal from a reaction performed with a known amount of quantification standard template (termed R8; 5′-AATCCGTCGAGCAGAGTTAG [GGTTAG]₇-3′) (SEQ. ID. NO. 5573) allows expression of telomerase activity as an absolute value. The absolute value=TPG (total product generated)=[(TP-TPi)/Tl]/[(R8-B)/RI)]×100, where TP=telomerase products from test extract, TPi=telomerase products from a heat-inactivated (75° C., 10 minutes) extract reaction, TI=the signal from the internal control, R8=the signal from the R8 qualification standard template reaction, B=signal from a lysis buffer-only blank reaction, and RI=the internal control value for the reaction containing R8 template and NT and TSNT control primers. TPG values of 0-10,000 are possible, with the linear range being from approximately 1 to 1000 TPG. The range of 1 to 1000 TPG encompasses the minimum and maximum levels of telomerase activity in most tumor samples tested, while non-tumor cells most often have no telomerase activity (TPG approximately zero).

[0040] An alternative telomerase assay, which does not employ PCR amplification, is described by Raymond et al. 1999, Br. J. Cancer 80: 1332-1341.

[0041] By “enzymatic nucleic acid molecule” it is meant an RNA molecule which has complementarity in a substrate binding region to a specified gene target, and also has an enzymatic activity which is active to specifically cleave target RNA. That is, the enzymatic RNA molecule is able to intermolecularly cleave RNA and thereby inactivate a target RNA molecule. This complementary regions allow sufficient hybridization of the enzymatic RNA molecule to the target RNA and thus permit cleavage. One hundred percent complementarity between RNA and the target gene or target RNA is preferred, but complementarity as low as 50-75% may also be useful in this invention. The nucleic acids may be modified at the base, sugar, and/or phosphate groups. The term enzymatic nucleic acid is used interchangeably with phrases such as ribozymes, catalytic RNA, enzymatic RNA, catalytic DNA, aptazyme or aptamer-binding ribozyme, regulatable ribozyme, catalytic oligonucleotides, nucleozyme, DNAzyme, RNA enzyme, endoribonuclease, endonuclease, minizyme, leadzyme, oligozyme or DNA enzyme. All of these terminologies describe nucleic acid molecules with enzymatic activity. The specific enzymatic nucleic acid molecules described in the instant application are not meant to be limiting and those skilled in the art will recognize that all that is important in an enzymatic nucleic acid molecule of this invention is that it have a specific substrate binding site which is complementary to one or more of the target nucleic acid regions, and that it have nucleotide sequences within or surrounding that substrate binding site which impart a nucleic acid cleaving activity to the molecule (Cech et al., U.S. Pat. No. 4,987,071; Cech et al., 1988, JAMA).

[0042] By “enzymatic portion” or “catalytic domain” is meant that portion/region of the enzymatic nucleic acid molecule essential for cleavage of a nucleic acid substrate (for example see FIG. 1).

[0043] By “substrate binding arm” or “substrate binding domain” is meant that portion/region of a ribozyme which is complementary to (i.e., able to base-pair with) a portion of its substrate. Generally, such complementarity is 100%, but can be less if desired. For example, as few as 10 bases out of 14 may be base-paired. Such arms are shown generally in FIG. 1. That is, these arms contain sequences within a ribozyme which are intended to bring ribozyme and target RNA together through complementary base-pairing interactions. The ribozyme of the invention may have binding arms that are contiguous or non-contiguous and may be of varying lengths. The length of the binding arm(s) are preferably greater than or equal to four nucleotides and of sufficient length to stably interact with the target RNA; specifically 12-100 nucleotides; more specifically 14-24 nucleotides long. If two binding arms are chosen, the design is such that the length of the binding arms are symmetrical (i.e., each of the binding arms is of the same length; e.g., five and five nucleotides, six and six nucleotides or seven and seven nucleotides long) or asymmetrical (i.e., the binding arms are of different length; e.g., six and three nucleotides; three and six nucleotides long; four and five nucleotides long; four and six nucleotides long; four and seven nucleotides long; and the like).

[0044] By DNAzyme is meant, an enzymatic nucleic acid molecule lacking a 2′-OH group. In particular embodiments the enzymatic nucleic acid molecule may have an attached linker(s) or other attached or associated groups, moieties, or chains containing one or more nucleotides with 2′-OH groups.

[0045] By “sufficient length” is meant an oligonucleotide of greater than or equal to 3 nucleotides, 5 nucleotides, 7 nucleotides, 9 nucleotides or even 12 nucleotides.

[0046] By “stably interact” is meant, interaction of the oligonucleotides with target nucleic acid (e.g., by forming hydrogen bonds with complementary nucleotides in the target under physiological conditions).

[0047] By “equivalent” RNA to telomerase enzyme is meant to include those naturally occurring RNA molecules having homology (partial or complete) to nucleic acid sequences encoding telomerase proteins or encoding for proteins with similar function as telomerase in various organisms, including human, rodent, primate, rabbit, pig, protozoans, fungi, plants, and other microorganisms and parasites. The equivalent RNA sequence also includes in addition to the coding region, regions such as 5′-untranslated region, 3′-untranslated region, introns, intron-exon junction and the like.

[0048] By “homology” is meant the nucleotide sequence of two or more nucleic acid molecules is partially or completely identical.

[0049] By “antisense nucleic acid” it is meant a non-enzymatic nucleic acid molecule that binds to target RNA by means of RNA-RNA or RNA-DNA or RNA-PNA (protein nucleic acid; Egholm et al., 1993 Nature 365, 566) interactions and alters the activity of the target RNA (for a review see Stein and Cheng, 1993 Science 261, 1004). Typically, antisense molecules will be complementary to a target sequence along a single contiguous sequence of the antisense molecule. However, in certain embodiments, an antisense molecule may bind to substrate such that the substrate molecule forms a loop, and/or an antisense molecule may bind such that the antisense molecule forms a loop. Thus, the antisense molecule may be complementary to two (or even more) non-contiguous substrate sequences or two (or even more) non-contiguous sequence portions of an antisense molecule may be complementary to a target sequence or both.

[0050] By “2-5A antisense chimera” it is meant, an antisense oligonucleotide containing a 5′ phosphorylated 2′-5′-linked adenylate residues. These chimeras bind to target RNA in a sequence-specific manner and activate a cellular 2-5A-dependent ribonuclease which, in turn, cleaves the target RNA (Torrence et al., 1993 Proc. Natl. Acad. Sci. USA 90, 1300).

[0051] By “triplex DNA” it is meant an oligonucleotide that can bind to a double-stranded DNA in a sequence-specific manner to form a triple-strand helix. Formation of such triple helix structure has been shown to inhibit transcription of the targeted gene (Duval-Valentin et al., 1992 Proc. Natl. Acad. Sci.USA 89, 504).

[0052] By “gene” it is meant a nucleic acid that encodes an RNA.

[0053] By “complementarity” is meant that a nucleic acid can form hydrogen bond(s) with another RNA sequence by either traditional Watson-Crick or other non-traditional types. In reference to the nucleic molecules of the present invention, the binding free energy for a nucleic acid molecule with its target or complementary sequence is sufficient to allow the relevant function of the nucleic acid to proceed, e.g., ribozyme cleavage, antisense or triple helix inhibition. Determination of binding free energies for nucleic acid molecules is well known in the art (see, e.g., Turner et al., 1987, CSH Symp. Quant. Biol. Lll pp.123-133; Frier et al., 1986, Proc. Nat. Acad. Sci. USA 83:9373-9377; Turner et al., 1987, J. Am. Chem. Soc. 109:3783-3785. A percent complementarity indicates the percentage of contiguous residues in a nucleic acid molecule which can form hydrogen bonds (e.g., Watson-Crick base pairing) with a second nucleic acid sequence (e.g., 5, 6, 7, 8, 9, 10 out of 10 being 50%, 60%, 70%, 80%, 90%, and 100% complementary). “Perfectly complementary” means that all the contiguous residues of a nucleic acid sequence will hydrogen bond with the same number of contiguous residues in a second nucleic acid sequence.

[0054] At least seven basic varieties of naturally-occurring enzymatic RNAs are known presently. Each can catalyze the hydrolysis of RNA phosphodiester bonds in trans (and thus can cleave other RNA molecules) under physiological conditions. Table I summarizes some of the characteristics of these ribozymes. In general, enzymatic nucleic acids act by first binding to a target RNA. Such binding occurs through the target binding portion of a enzymatic nucleic acid which is held in close proximity to an enzymatic portion of the molecule that acts to cleave the target RNA. Thus, the enzymatic nucleic acid first recognizes and then binds a target RNA through complementary base-pairing, and once bound to the correct site, acts enzymatically to cut the target RNA. Strategic cleavage of such a target RNA will destroy its ability to direct synthesis of an encoded protein. After an enzymatic nucleic acid has bound and cleaved its RNA target, it is released from that RNA to search for another target and can repeatedly bind and cleave new targets. Thus, a single ribozyme molecule is able to cleave many molecules of target RNA. In addition, the ribozyme is a highly specific inhibitor of gene expression, with the specificity of inhibition depending not only on the base-pairing mechanism of binding to the target RNA, but also on the mechanism of target RNA cleavage. Single mismatches, or base-substitutions, near the site of cleavage can completely eliminate catalytic activity of a ribozyme.

[0055] The enzymatic nucleic acid molecule that cleave the specified sites in telomerase-specific RNAs represent a novel therapeutic approach to treat a variety of pathologic indications, including, cancer, tumorigenesis, restenosis and others.

[0056] In one of the preferred embodiments of the inventions described herein, the enzymatic nucleic acid molecule is formed in a hammerhead or hairpin motif, but may also be formed in the motif of a hepatitis delta virus, group I intron, group II intron or RNase P RNA (in association with an RNA guide sequence), Neurospora VS RNA, DNAzymes, NCH cleaving motifs, or G-cleavers. Examples of such hammerhead motifs are described by Dreyfus, supra, Rossi et al., 1992, AIDS Research and Human Retroviruses 8, 183; of hairpin motifs by Hampel et al., EP0360257, Hampel and Tritz, 1989 Biochemistry 28, 4929, Feldstein et al., 1989, Gene 82, 53, Haseloff and Gerlach, 1989, Gene, 82, 43, and Hampel et al., 1990 Nucleic Acids Res. 18, 299; Chowrira & McSwiggen, U.S. Pat. No. 5,631,359; of the hepatitis delta virus motif is described by Perrotta and Been, 1992 Biochemistry 31, 16; of the RNase P motif by Guerrier-Takada et al., 1983 Cell 35, 849; Forster and Altman, 1990, Science 249, 783; Li and Altman, 1996, Nucleic Acids Res. 24, 835; Neurospora VS RNA ribozyme motif is described by Collins (Saville and Collins, 1990 Cell 61, 685-696; Saville and Collins, 1991 Proc. Natl. Acad. Sci. USA 88, 8826-8830; Collins and Olive, 1993 Biochemistry 32, 2795-2799; Guo and Collins, 1995, EMBO. J. 14, 363); Group II introns are described by Griffin et al., 1995, Chem. Biol. 2, 761; Michels and Pyle, 1995, Biochemistry 34, 2965; Pyle et al., International PCT Publication No. WO 96/22689; of the Group I intron by Cech et al., U.S. Pat. No. 4,987,071 and of DNAzymes by Usman et al., International PCT Publication No. WO 95/11304; Chartrand et al., 1995, NAR 23, 4092; Breaker et al., 1995, Chem. Bio. 2, 655; Santoro et al., 1997, PNAS 94, 4262. NCH cleaving motifs are described in Ludwig & Sproat, International PCT Publication No. WO 98/58058; and G-cleavers are described in Kore et al., 1998, Nucleic Acids Research 26, 4116-4120 and Eckstein et al., International PCT Publication No. WO 99/16871. Additional motifs such as the Aptazyme (Breaker et al., WO 98/43993), Amberzyme (Class I motif; FIG. 3; Beigelman et al., U.S. Ser. No. 09/301,511) and Zinzyme (Beigelman et al., U.S. Ser. No. 09/301,511) can also be used in the present invention. These specific motifs are not limiting in the invention and those skilled in the art will recognize that all that is important in an enzymatic nucleic acid molecule of this invention is that it has a specific substrate binding site which is complementary to one or more of the target gene RNA regions, and that it have nucleotide sequences within or surrounding that substrate binding site which impart an RNA cleaving activity to the molecule (Cech et al., U.S. Pat. No. 4,987,071).

[0057] In preferred embodiments of the present invention, a nucleic acid molecule, e.g., an antisense molecule, a triplex DNA, or a ribozyme, is 13 to 100 nucleotides in length, e.g., in specific embodiments 35, 36, 37, or 38 nucleotides in length (e.g., for particular ribozymes or antisense). In particular embodiments, the nucleic acid molecule is 15-100, 17-100, 20-100, 21-100, 23-100, 25-100, 27-100, 30-100, 32-100, 35-100, 40-100, 50-100, 60-100, 70-100, or 80-100 nucleotides in length. Instead of 100 nucleotides being the upper limit on the length ranges specified above, the upper limit of the length range can be, for example, 30, 40, 50, 60, 70, or 80 nucleotides. Thus, for any of the length ranges, the length range for particular embodiments has lower limit as specified, with an upper limit as specified which is greater than the lower limit. For example, in a particular embodiment, the length range can be 35-50 nucleotides in length. All such ranges are expressly included. Also in particular embodiments, a nucleic acid molecule can have a length which is any of the lengths specified above, for example, 21 nucleotides in length.

[0058] In a preferred embodiment the invention provides a method for producing a class of nucleic acid -based gene inhibiting agents which exhibit a high degree of specificity for the RNA of a desired target. For example, the enzymatic nucleic acid molecule is preferably targeted to a highly conserved sequence region of target RNAs encoding telomerase proteins (specifically TERT gene) such that specific treatment of a disease or condition can be provided with either one or several nucleic acid molecules of the invention. Such nucleic acid molecules can be delivered exogenously to specific tissue or cellular targets as required. Alternatively, the nucleic acid molecules (e.g., ribozymes and antisense) can be expressed from DNA and/or RNA vectors that are delivered to specific cells.

[0059] By “highly conserved sequence region” is meant a nucleotide sequence of one or more regions in a target gene does not vary significantly from one generation to the other or from one biological system to the other.

[0060] The nucleic acid-based inhibitors of telomerase expression are useful for the prevention of the diseases and conditions including cancer, macular degeneration, restenosis, certain infectious diseases, transplant rejection and autoimmune disease such as multiple sclerosis, lupus, and AIDS; Age related disease such as macular degeneration, skin ulceration, and rheumatoid arthritis and any other diseases or conditions that are related to the levels of telomerase in a cell or tissue.

[0061] By “related” is meant that the reduction of telomerase expression (specifically TERT gene) RNA levels and thus reduction in the level of the respective protein will relieve, to some extent, the symptoms of the disease or condition.

[0062] The nucleic acid-based inhibitors of the invention are added directly, or can be complexed with cationic lipids, packaged within liposomes, or otherwise delivered to target cells or tissues. The nucleic acid or nucleic acid complexes can be locally administered to relevant tissues ex vivo, or in vivo through injection, infusion pump or stent, with or without their incorporation in biopolymers. In preferred embodiments, the enzymatic nucleic acid inhibitors comprise sequences which are complementary to the substrate sequences in Tables III-VII. Examples of such enzymatic nucleic acid molecules also are shown in Tables III to VII. Examples of such enzymatic nucleic acid molecules consist essentially of sequences defined in these Tables.

[0063] In yet another embodiment, the invention features antisense nucleic acid molecules and 2-5A chimera including sequences complementary to the substrate sequences shown in tables III to VII. Such nucleic acid molecules can include sequences as shown for the binding arms of the enzymatic nucleic acid molecules in Tables III to VII. Similarly, triplex molecules can be provided targeted to the corresponding DNA target regions, and containing the DNA equivalent of a target sequence or a sequence complementary to the specified target (substrate) sequence. Typically, antisense molecules will be complementary to a target sequence along a single contiguous sequence of the antisense molecule. However, in certain embodiments, an antisense molecule may bind to substrate such that the substrate molecule forms a loop, and/or an antisense molecule may bind such that the antisense molecule forms a loop. Thus, the antisense molecule may be complementary to two (or even more) non-contiguous substrate sequences or two (or even more) non-contiguous sequence portions of an antisense molecule may be complementary to a target sequence or both.

[0064] By “consists essentially of” is meant that the active ribozyme contains an enzymatic center or core equivalent to those in the examples, and binding arms able to bind mRNA such that cleavage at the target site occurs. Other sequences may be present which do not interfere with such cleavage. Thus, a core region may, for example, include one or more loop, stem-loop structure, which does not prevent enzymatic activity. The underlined regions in the sequences in Tables III and IV can be such a loop, and can be represented generally as sequence “X”. For example, a core sequence for a hammerhead ribozyme can be a 5′-CUGAUGAG-3′ and 5′-CGAA-3′connected by “X”, where X is 5′-GCCGUUAGGC-3′(SEQ ID NO 5574), or any other Stem II region known in the art.”

[0065] In another aspect of the invention, ribozymes or antisense molecules that cleave target RNA molecules and inhibit telomerase enzyme (specifically TERT) activity are expressed from transcription units inserted into DNA or RNA vectors. The recombinant vectors are preferably DNA plasmids or viral vectors. Ribozyme or antisense expressing viral vectors could be constructed based on, but not limited to, adeno-associated virus, retrovirus, adenovirus, or alphavirus. Preferably, the recombinant vectors capable of expressing the ribozymes or antisense are delivered as described above, and persist in target cells. Alternatively, viral vectors may be used that provide for transient expression of ribozymes or antisense. Such vectors might be repeatedly administered as necessary. Once expressed, the ribozymes or antisense bind to the target RNA and inhibit its function or expression. Delivery of ribozyme or antisense expressing vectors could be systemic, such as by intravenous or intramuscular administration, by administration to target cells ex-planted from the patient followed by reintroduction into the patient, or by any other means that would allow for introduction into the desired target cell.

[0066] By “vectors” is meant any nucleic acid- and/or viral-based technique used to deliver a desired nucleic acid.

[0067] By “patient” is meant an organism which is a donor or recipient of explanted cells or the cells themselves. “Patient” also refers to an organism to which the nucleic acid molecules of the invention can be administered. Preferably, a patient is a mammal or mammalian cells. More preferably, a patient is a human or human cells.

[0068] The nucleic acid molecules of the instant invention, individually, or in combination or in conjunction with other drugs, can be used to treat diseases or conditions discussed above. For example, to treat a disease or condition associated with the levels of telomerase enzyme, the patient may be treated, or other appropriate cells may be treated, as is evident to those skilled in the art, individually or in combination with one or more drugs under conditions suitable for the treatment.

[0069] In a further embodiment, the described molecules, such as antisene or ribozymes can be used in combination with other known treatments to treat conditions or diseases discussed above. For example, the described molecules could be used in combination with one or more known therapeutic agents to treat cancer.

[0070] In another preferred embodiment, the invention features nucleic acid-based inhibitors (e.g., enzymatic nucleic acid molecules (ribozymes), antisense nucleic acids, 2-5A antisense chimeras, triplex DNA, antisense nucleic acids containing RNA cleaving chemical groups) and methods for their use to down regulate or inhibit the expression of genes (e.g., TERT) capable of progression and/or maintenance of cancer.

[0071] In another preferred embodiment, the invention features nucleic acid-based techniques (e.g., enzymatic nucleic acid molecules (ribozymes), antisense nucleic acids, 2-5A antisense chimeras, triplex DNA, antisense nucleic acids containing RNA cleaving chemical groups) and methods for their use to down regulate or inhibit the expression of TERT gene expression.

[0072] By “comprising” is meant including, but not limited to, whatever follows the word “comprising”. Thus, use of the term “comprising” indicates that the listed elements are required or mandatory, but that other elements are optional and may or may not be present. By “consisting of” is meant including, and limited to, whatever follows the phrase “consisting of”. Thus, the phrase “consisting of” indicates that the listed elements are required or mandatory, and that no other elements may be present. By “consisting essentially of” is meant including any elements listed after the phrase, and limited to other elements that do not interfere with or contribute to the activity or action specified in the disclosure for the listed elements. Thus, the phrase “consisting essentially of” indicates that the listed elements are required or mandatory, but that other elements are optional and may or may not be present depending upon whether or not they affect the activity or action of the listed elements.

[0073] Other features and advantages of the invention will be apparent from the following description of the preferred embodiments thereof, and from the claims.

### BRIEF DESCRIPTION OF THE DRAWINGS

[0074] FIG. 1 shows the secondary structure model for seven different classes of enzymatic nucleic acid molecules. Arrow indicates the site of cleavage. —indicate the target sequence. Lines interspersed with dots are meant to indicate tertiary interactions. —is meant to indicate base-paired interaction. Group I Intron: P1-P9.0 represent various stem-loop structures (Cech et al., 1994, Nature Struc. Bio., 1, 273). RNase P (M1RNA): EGS represents external guide sequence (Forster et al., 1990, Science, 249, 783; Pace et al., 1990, J. Biol. Chem., 265, 3587). Group II Intron: 5′SS means 5′ splice site; 3′SS means 3′-splice site; IBS means intron binding site; EBS means exon binding site (Pyle et al., 1994, Biochemistry, 33, 2716). VS RNA: I-VI are meant to indicate six stem-loop structures; shaded regions are meant to indicate tertiary interaction (Collins, International PCT Publication No. WO 96/19577). HDV Ribozyme: I-IV are meant to indicate four stem-loop structures (Been et al., U.S. Pat. No. 5,625,047). Hammerhead Ribozyme: I-II are meant to indicate three stem-loop structures; stems I-III can be of any length and may be symmetrical or asymmetrical (Usman et al., 1996, Curr. Op. Struct. Bio., 1, 527). Hairpin Ribozyme: Helix 1, 4 and 5 can be of any length; Helix 2 is between 3 and 8 base-pairs long; Y is a pyrimidine; Helix 2 (H2) is provided with a least 4 base pairs (i.e., n is 1, 2, 3 or 4) and helix 5 can be optionally provided of length 2 or more bases (preferably 3-20 bases, i.e., m is from 1-20 or more). Helix 2 and helix 5 may be covalently linked by one or more bases (i.e., r is ≧1 base). Helix 1, 4 or 5 may also be extended by 2 or more base pairs (e.g., 4-20 base pairs) to stabilize the ribozyme structure, and preferably is a protein binding site. In each instance, each N and N′ independently is any normal or modified base and each dash represents a potential base-pairing interaction. These nucleotides may be modified at the sugar, base or phosphate. Complete base-pairing is not required in the helices, but is preferred. Helix 1 and 4 can be of any size (i.e., o and p is each independently from 0 to any number, e.g., 20) as long as some base-pairing is maintained. Essential bases are shown as specific bases in the structure, but those in the art will recognize that one or more may be modified chemically (abasic, base, sugar and/or phosphate modifications) or replaced with another base without significant effect. Helix 4 can be formed from two separate molecules, i.e., without a connecting loop. The connecting loop when present may be a ribonucleotide with or without modifications to its base, sugar or phosphate. “q”≧is 2 bases. The connecting loop can also be replaced with a non-nucleotide linker molecule. H refers to bases A, U, or C. Y refers to pyrimidine bases. “_” refers to a covalent bond. (Burke et al., 1996, Nucleic Acids & Mol. Biol., 10, 129; Chowrira et al., U.S. Pat. No. 5,631,359).

[0075] FIG. 2 shows examples of chemically stabilized ribozyme motifs. HH Rz, represents hammerhead ribozyme motif (Usman et al., 1996, Curr. Op. Struct. Bio., 1, 527); NCH Rz represents the NCH ribozyme motif (Ludwig & Sproat, International PCT Publication No. WO 98/58058); G-Cleaver, represents G-cleaver ribozyme motif (Kore et al., 1998, Nucleic Acids Research 26, 4116-4120). N or n, represent independently a nucleotide which may be same or different and have complementarity to each other; rI, represents riboInosine nucleotide; arrow indicates the site of cleavage within the target. Position 4 of the HH Rz and the NCH Rz is shown as having 2′-C-allyl modification, but those skilled in the art will recognize that this position can be modified with other modifications well known in the art, so long as such modifications do not significantly inhibit the activity of the ribozyme.

[0076] FIG. 3 shows an example of the Amberzyme ribozyme motif that is chemically stabilized (see for example Beigelman et al., WO 99/55857; also referred to as Class I Motif).

[0077] FIG. 4 shows an example of the Zinzyme A ribozyme motif that is chemically stabilized (see for example Beigelman et al., WO 99/55857; also referred to as Class A Motif).

### DETAILED DESCRIPTION OF THE INVENTION

[0078] Mechanism of Action of Nucleic Acid Molecules of the Invention

[0079] Antisense: Antisense molecules may be modified or unmodified RNA, DNA, or mixed polymer oligonucleotides and primarily function by specifically binding to matching sequences resulting in inhibition of peptide synthesis (Wu-Pong, November 1994, BioPharm, 20-33). The antisense oligonucleotide binds to target RNA by Watson Crick base-pairing and blocks gene expression by preventing ribosomal translation of the bound sequences either by steric blocking or by activating RNase H enzyme. Antisense molecules may also alter protein synthesis by interfering with RNA processing or transport from the nucleus into the cytoplasm (Mukhopadhyay & Roth, 1996, Crit. Rev. in Oncogenesis 7, 151-190).

[0080] In addition, binding of single stranded DNA to RNA may result in nuclease degradation of the heteroduplex (Wu-Pong, supra; Crooke, supra). To date, the only backbone modified DNA chemistry which will act as substrates for RNase H are phosphorothioates and phosphorodithioates. Recently it has been reported that 2′-arabino and 2′-fluoro arabino-containing oligos can also activate RNase H activity.

[0081] A number of antisense molecules have been described that utilize novel configurations of chemically modified nucleotides, secondary structure, and/or RNase H substrate domains (Woolf et al., International PCT Publication No. WO 98/13526; Thompson et al., U.S. S No. 60/082,404 which was filed on Apr. 20, 1998; Hartmann et al., U.S. S No. 60/101,174 which was filed on Sep. 21, 1998) all of these are incorporated by reference herein in their entirety.

[0082] Triplex Forming Oligonucleotides (TFO): Single stranded DNA may be designed to bind to genomic DNA in a sequence specific manner. TFOs are comprised of pyrimidine-rich oligonucleotides which bind DNA helices through Hoogsteen Base-pairing (Wu-Pong, supra). The resulting triple helix composed of the DNA sense, DNA antisense, and TFO disrupts RNA synthesis by RNA polymerase. The TFO mechanism may result in gene expression or cell death since binding may be irreversible (Mukhopadhyay & Roth, supra)

[0083] 2-5A Antisense Chimera: The 2-5A system is an interferon mediated mechanism for RNA degradation found in higher vertebrates (Mitra et al., 1996, Proc Nat Acad Sci USA 93, 6780-6785). Two types of enzymes, 2-5A synthetase and RNase L, are required for RNA cleavage. The 2-5A synthetases require double stranded RNA to form 2′-5′ oligoadenylates (2-5A). 2-5A then acts as an allosteric effector for utilizing RNase L which has the ability to cleave single stranded RNA. The ability to form 2-5A structures with double stranded RNA makes this system particularly useful for inhibition of viral replication.

[0084] (2′-5′) oligoadenylate structures may be covalently linked to antisense molecules to form chimeric oligonucleotides capable of RNA cleavage (Torrence, supra). These molecules putatively bind and activate a 2-5A dependent RNase, the oligonucleotide/enzyme complex then binds to a target RNA molecule which can then be cleaved by the RNase enzyme.

[0085] Enzymatic Nucleic Acid: Seven basic varieties of naturally-occurring enzymatic RNAs are presently known. In addition, several in vitro selection (evolution) strategies (Orgel, 1979, Proc. R. Soc. London, B 205, 435) have been used to evolve new nucleic acid catalysts capable of catalyzing cleavage and ligation of phosphodiester linkages (Joyce, 1989, Gene, 82, 83-87; Beaudry et al., 1992, Science 257, 635-641; Joyce, 1992, Scientific American 267, 90-97; Breaker et al., 1994, TIBTECH 12, 268; Bartel et al., 1993, Science 261:1411-1418; Szostak, 1993, TIBS 17, 89-93; Kumar et al., 1995, FASEB J., 9, 1183; Breaker, 1996, Curr. Op. Biotech., 7, 442; Santoro et al., 1997, Proc. Natl. Acad. Sci., 94, 4262; Tang et al., 1997, RNA 3, 914; Nakamaye & Eckstein, 1994, supra; Long & Uhlenbeck, 1994, supra; Ishizaka et al., 1995, supra; Vaish et al., 1997, Biochemistry 36, 6495; all of these are incorporated by reference herein). Each can catalyze a series of reactions including the hydrolysis of phosphodiester bonds in trans (and thus can cleave other RNA molecules) under physiological conditions.

[0086] Nucleic acid molecules of this invention will block to some extent telomerase protein expression (specifically TERT) and can be used to treat disease or diagnose disease associated with the levels of telomerase enzyme.

[0087] The enzymatic nature of a ribozyme has significant advantages, such as the concentration of ribozyme necessary to affect a therapeutic treatment is lower. This advantage reflects the ability of the ribozyme to act enzymatically. Thus, a single ribozyme molecule is able to cleave many molecules of target RNA. In addition, the ribozyme is a highly specific inhibitor, with the specificity of inhibition depending not only on the base-pairing mechanism of binding to the target RNA, but also on the mechanism of target RNA cleavage. Single mismatches, or base-substitutions, near the site of cleavage can be chosen to completely eliminate catalytic activity of a ribozyme.

[0088] Nucleic acid molecules having an endonuclease enzymatic activity are able to repeatedly cleave other separate RNA molecules in a nucleotide base sequence-specific manner. Such enzymatic nucleic acid molecules can be targeted to virtually any RNA transcript, and achieved efficient cleavage in vitro (Zaug et al., 324, Nature 429 1986; Uhlenbeck, 1987 Nature 328, 596; Kim et al., 84 Proc. Natl. Acad. Sci. USA 8788, 1987; Dreyfus, 1988, Einstein Quart. J. Bio. Med., 6, 92; Haseloff and Gerlach, 334 Nature 585, 1988; Cech, 260 JAMA 3030, 1988; and Jefferies et al., 17 Nucleic Acids Research 1371, 1989; Santoro et al., 1997 supra).

[0089] Because of their sequence specificity, trans-cleaving ribozymes show promise as therapeutic agents for human disease (Usman & McSwiggen, 1995 Ann. Rep. Med. Chem. 30, 285-294; Christoffersen and Marr, 1995 J. Med. Chem. 38, 2023-2037). Ribozymes can be designed to cleave specific RNA targets within the background of cellular RNA. Such a cleavage event renders the RNA non-functional and abrogates protein expression from that RNA. In this manner, synthesis of a protein associated with a disease state can be selectively inhibited.

[0090] Target Sites

[0091] Targets for useful ribozymes and antisense nucleic acids can be determined as disclosed in Draper et al., WO 93/23569; Sullivan et al., WO 93/23057; Thompson et al., WO 94/02595; Draper et al., WO 95/04818; McSwiggen et al., U.S. Pat. No. 5,525,468, and hereby incorporated by reference herein in totality. Other examples include the following PCT applications which concern inactivation of expression of disease-related genes: WO 95/23225, WO 95/13380, WO 94/02595, incorporated by reference herein. Rather than repeat the guidance provided in those documents here, below are provided specific examples of such methods, not limiting to those in the art. Ribozymes and antisense to such targets are designed as described in those applications and synthesized to be tested in vitro and in vivo, as also described. The sequence of human TERT RNAs were screened for optimal enzymatic nucleic acid and antisense target sites using a computer folding algorithm. Antisense, hammerhead, DNAzyme, NCH, or G-Cleaver ribozyme binding/cleavage sites were identified. These sites are shown in Tables III to VII (all sequences are 5′ to 3′ in the tables; the underlined region can be any base-paired sequence, the actual sequence is not relevant here). The nucleotide base position is noted in the Tables as that site to be cleaved by the designated type of enzymatic nucleic acid molecule. While human sequences can be screened and enzymatic nucleic acid molecule and/or antisense thereafter designed, as discussed in Stinchcomb et al., WO 95/23225, mouse targeted ribozymes may be useful to test efficacy of action of the enzymatic nucleic acid molecule and/or antisense prior to testing in humans.

[0092] Antisense, hammerhead, DNAzyme, NCH, or G-Cleaver ribozyme binding/cleavage sites were identified. The nucleic acid molecules were individually analyzed by computer folding (Jaeger et al., 1989 Proc. Natl. Acad. Sci. USA, 86, 7706) to assess whether the sequences fold into the appropriate secondary structure. Those nucleic acid molecules with unfavorable intramolecular interactions such as between the binding arms and the catalytic core were eliminated from consideration. Varying binding arm lengths can be chosen to optimize activity.

[0093] Antisense, hammerhead, DNAzyme, NCH, or G-Cleaver ribozyme binding/cleavage sites were identified and were designed to anneal to various sites in the RNA target. The binding arms are complementary to the target site sequences described above. The nucleic acid molecules were chemically synthesized. The method of synthesis used follows the procedure for normal DNA/RNA synthesis as described below and in Usman et al., 1987 J. Am. Chem. Soc., 109, 7845; Scaringe et al., 1990 Nucleic Acids Res., 18, 5433; and Wincott et al., 1995 Nucleic Acids Res. 23, 2677-2684; Caruthers et al., 1992, Methods in Enzymology 211,3-19.

[0094] Synthesis of Nucleic Acid Molecules

[0095] Synthesis of nucleic acids greater than 100 nucleotides in length is difficult using automated methods, and the therapeutic cost of such molecules is prohibitive. In this invention, small nucleic acid motifs (“small” refers to nucleic acid motifs no more than 100 nucleotides in length, preferably no more than 80 nucleotides in length, and most preferably no more than 50 nucleotides in length; e.g., antisense oligonucleotides, hammerhead or the hairpin ribozymes) are preferably used for exogenous delivery. The simple structure of these molecules increases the ability of the nucleic acid to invade targeted regions of RNA structure. Exemplary molecules of the instant invention were chemically synthesized, and others can similarly be synthesized. Oligodeoxyribonucleotides were synthesized using standard protocols as described in Caruthers et al., 1992, Methods in Enzymology 211,3-19, and is incorporated herein by reference.

[0096] The method of synthesis used for normal RNA including certain enzymatic nucleic acid molecules follows the procedure as described in Usman et al., 1987 J. Am. Chem. Soc., 109, 7845; Scaringe et al., 1990 Nucleic Acids Res., 18, 5433; and Wincott et al., 1995 Nucleic Acids Res. 23, 2677-2684 Wincott et al., 1997, Methods Mol. Bio., 74, 59, and makes use of common nucleic acid protecting and coupling groups, such as dimethoxytrityl at the 5′-end, and phosphoramidites at the 3′-end. In a non-limiting example, small scale syntheses were conducted on a 394 Applied Biosystems, Inc. synthesizer using a 0.2 μmol scale protocol with a 7.75 min coupling step for alkylsilyl protected nucleotides and a 2.5 min coupling step for 2′-O-methylated nucleotides. Table II outlines the amounts and the contact times of the reagents used in the synthesis cycle. Alternatively, syntheses at the 0.2 μmol scale can be done on a 96-well plate synthesizer, such as the instrument produced by Protogene (Palo Alto, Calif.) with minimal modification to the cycle. A 15-fold excess (31 μL of 0.1 M=3.1 μmol) of phosphoramidite and a 38.7-fold excess of S-ethyl tetrazole (31 μL of 0.25 M=7.75 μmol) relative to polymer-bound 5′-hydroxyl was used in each coupling cycle. Average coupling yields on the 394 Applied Biosystems, Inc. synthesizer, determined by colorimetric quantitation of the trityl fractions, were 97.5-99%. Other oligonucleotide synthesis reagents for the 394 Applied Biosystems, Inc. synthesizer; detritylation solution was 3% TCA in methylene chloride (ABI); capping was performed with 16% N-methyl imidazole in THF (ABI) and 10% acetic anhydride/10% 2,6-lutidine in THF (ABI); oxidation solution was 16.9 mM I₂, 49 mM pyridine, 9% water in THF (PERSEPTIVE™). Burdick & Jackson Synthesis Grade acetonitrile was used directly from the reagent bottle. S-Ethyltetrazole solution (0.25 M in acetonitrile) was made up from the solid obtained from American International Chemical, Inc.

[0097] Deprotection of the RNA was performed using either a two-pot or one-pot protocol. For the two-pot protocol, the polymer-bound trityl-on oligoribonucleotide was transferred to a 4 mL glass screw top vial and suspended in a solution of 40% aq. methylamine (1 mL) at 65° C. for 10 min. After cooling to −20° C., the supernatant was removed from the polymer support. The support was washed three times with 1.0 mL of EtOH:MeCN:H20/3:1:1, vortexed and the supernatant was then added to the first supernatant. The combined supernatants, containing the oligoribonucleotide, were dried to a white powder. The base deprotected oligoribonucleotide was resuspended in anhydrous TEA/HF/NMP solution (300 μL of a solution of 1.5 mL N-methylpyrrolidinone, 750 μL TEA and 1 mL TEA-3HF to provide a 1.4 M HF concentration) and heated to 65° C. After 1.5 h, the oligomer was quenched with 1.5 M NH₄HCO₃.

[0098] Alternatively, for the one-pot protocol, the polymer-bound trityl-on oligoribonucleotide was transferred to a 4 mL glass screw top vial and suspended in a solution of 33% ethanolic methylamine/DMSO:1/1 (0.8 mL) at 65° C. for 15 min. The vial was brought to r.t. TEA•3HF (0.1 mL) was added and the vial was heated at 65° C. for 15 min. The sample was cooled at −20° C. and then quenched with 1.5 M NH₄HCO₃.

[0099] For purification of the trityl-on oligomers, the quenched NH₄HCO₃ solution was loaded onto a C-18 containing cartridge that had been prewashed with acetonitrile followed by 50 mM TEAA. After washing the loaded cartridge with water, the RNA was detritylated with 0.5% TFA for 13 min. The cartridge was then washed again with water, salt exchanged with 1 M NaCl and washed with water again. The oligonucleotide was then eluted with 30% acetonitrile.

[0100] Inactive hammerhead ribozymes or binding attenuated control (BAC) oligonucleotides) were synthesized by substituting a U for G₅ and a U for A14 (numbering from Hertel, K. J., et al., 1992, Nucleic Acids Res., 20, 3252). Similarly, one or more nucleotide substitutions can be introduced in other enzymatic nucleic acid molecules to inactivate the molecule and such molecules can serve as a negative control.

[0101] The average stepwise coupling yields were >98% (Wincott et al., 1995 Nucleic Acids Res. 23, 2677-2684). Those of ordinary skill in the art will recognize that the scale of synthesis can be adapted to be larger or smaller than the example described above including but not limited to 96 well format, all that is important is the ratio of chemicals used in the reaction.

[0102] Alternatively, the nucleic acid molecules of the present invention can be synthesized separately and joined together post-synthetically, for example by ligation (Moore et al., 1992, Science 256, 9923; Draper et al., International PCT publication No. WO 93/23569; Shabarova et al., 1991, Nucleic Acids Research 19, 4247; Bellon et al., 1997, Nucleosides & Nucleotides, 16, 951; Bellon et al., 1997 Bioconjugate Chem. 8, 204).

[0103] The nucleic acid molecules of the present invention are modified extensively to enhance stability by modification with nuclease resistant groups, for example, 2′-amino, 2′-C-allyl, 2′-flouro, 2′-O-methyl, 2′-H (for a review see Usman and Cedergren, 1992 TIBS 17, 34; Usman et al., 1994 Nucleic Acids Symp. Ser. 31, 163). Ribozymes are purified by gel electrophoresis using general methods or are purified by high pressure liquid chromatography (HPLC; See Wincott et al., Supra, the totality of which is hereby incorporated herein by reference) and are re-suspended in water.

[0104] The sequences of the ribozymes that are chemically synthesized, useful in this study, are shown in Tables III to VII. Those in the art will recognize that these sequences are representative only of many more such sequences where the enzymatic portion of the ribozyme (all but the binding arms) is altered to affect activity. The ribozyme sequences listed in Tables III to V and VII may be formed of ribonucleotides or other nucleotides or non-nucleotides. Such ribozymes with enzymatic activity are equivalent to the ribozymes described specifically in the Tables.

[0105] Optimizing Activity of the Nucleic Acid Molecule of the Invention.

[0106] Chemically synthesizing synthesizing nucleic acid molecules with modifications (base, sugar and/or phosphate) that prevent their degradation by serum ribonucleases may increase their potency (see e.g., Eckstein et al., International Publication No. WO 92/07065; Perrault et al., 1990 Nature 344, 565; Pieken et al., 1991 Science 253, 314; Usman and Cedergren, 1992 Trends in Biochem. Sci. 17, 334; Usman et al., International Publication No. WO 93/15187; and Rossi et al., International Publication No. WO 91/03162; Sproat, U.S. Pat. No. 5,334,711; and Burgin et al., supra; all of these describe various chemical modifications that can be made to the base, phosphate and/or sugar moieties of the nucleic acid molecules herein). Modifications which enhance their efficacy in cells, and removal of bases from nucleic acid molecules to shorten oligonucleotide synthesis times and reduce chemical requirements are desired. (All these publications are hereby incorporated by reference herein).

[0107] There are several examples in the art describing sugar, base and phosphate modifications that can be introduced into nucleic acid molecules with significant enhancement in their nuclease stability and efficacy. For example, oligonucleotides are modified to enhance stability and/or enhance biological activity by modification with nuclease resistant groups, for example, 2′-amino, 2′-C-allyl, 2′-flouro, 2′-O-methyl, 2′-H, nucleotide base modifications (for a review see Usman and Cedergren, 1992 TIBS 17, 34; Usman et al., 1994 Nucleic Acids Symp. Ser. 31, 163; Burgin et al., 1996 Biochemistry 35, 14090). Sugar modification of nucleic acid molecules have been extensively described in the art (see Eckstein et al., International Publication PCT No. WO 92/07065; Perrault et al. Nature 1990, 344, 565-568; Pieken et al. Science 1991, 253, 314-317; Usman and Cedergren, Trends in Biochem. Sci. 1992, 17, 334-339; Usman et al. International Publication PCT No. WO 93/15187; Sproat, U.S. Pat. No. 5,334,711 and Beigelman et al., 1995 J. Biol. Chem. 270, 25702; Beigelman et al., International PCT publication No. WO 97/26270; Beigelman et al., U.S. Pat. No. 5,716,824; Usman et al., U.S. Pat. No. 5,627,053; Woolf et al., International PCT Publication No. WO 98/13526; Thompson et al., U.S. S. No. 60/082,404 which was filed on Apr. 20, 1998; Karpeisky et al., 1998 Tetrahedron Lett. 39, 1131; all of the references are hereby incorporated in their totality by reference herein). Such publications describe general methods and strategies to determine the location of incorporation of sugar, base and/or phosphate modifications and the like into ribozymes without inhibiting catalysis, and are incorporated by reference herein. In view of such teachings, similar modifications can be used as described herein to modify the nucleic acid molecules of the instant invention.

[0108] While chemical modification of oligonucleotide internucleotide linkages with phosphorothioate, phosphorothioate, and/or 5′-methylphosphonate linkages improves stability, too many of these modifications may cause some toxicity. Therefore when designing nucleic acid molecules the amount of these internucleotide linkages should be minimized. The reduction in the concentration of these linkages should lower toxicity resulting in increased efficacy and higher specificity of these molecules.

[0109] Nucleic acid molecules having chemical modifications which maintain or enhance activity are provided. Such nucleic acid is also generally more resistant to nucleases than unmodified nucleic acid. Thus, in a cell and/or in vivo the activity may not be significantly lowered. Therapeutic nucleic acid molecules delivered exogenously must optimally be stable within cells until translation of the target RNA has been inhibited long enough to reduce the levels of the undesirable protein. This period of time varies between hours to days depending upon the disease state. Clearly, nucleic acid molecules must be resistant to nucleases in order to function as effective intracellular therapeutic agents. Improvements in the chemical synthesis of RNA and DNA (Wincott et al., 1995 Nucleic Acids Res. 23, 2677; Caruthers et al., 1992, Methods in Enzymology 211,3-19) incorporated by reference herein) have expanded the ability to modify nucleic acid molecules by introducing nucleotide modifications to enhance their nuclease stability as described above.

[0110] Use of these the nucleic acid-based molecules of the invention will lead to better treatment of the disease progression by affording the possibility of combination therapies (e.g., multiple antisense or enzymatic nucleic acid molecules targeted to different genes, nucleic acid molecules coupled with known small molecule inhibitors, or intermittent treatment with combinations of molecules (including different motifs) and/or other chemical or biological molecules)). The treatment of patients with nucleic acid molecules may also include combinations of different types of nucleic acid molecules.

[0111] Therapeutic nucleic acid molecules (e.g., enzymatic nucleic acid molecules and antisense nucleic acid molecules) delivered exogenously must optimally be stable within cells until translation of the target RNA has been inhibited long enough to reduce the levels of the undesirable protein. This period of time varies between hours to days depending upon the disease state. Clearly, these nucleic acid molecules must be resistant to nucleases in order to function as effective intracellular therapeutic agents. Improvements in the chemical synthesis of nucleic acid molecules described in the instant invention and in the art have expanded the ability to modify nucleic acid molecules by introducing nucleotide modifications to enhance their nuclease stability as described above.

[0112] By “enhanced enzymatic activity” is meant to include activity measured in cells and/or in vivo where the activity is a reflection of both catalytic activity and ribozyme stability. In this invention, the product of these properties is increased or not significantly (less that 10 fold) decreased in vivo compared to an all RNA ribozyme.

[0113] In yet another preferred embodiment, nucleic acid catalysts having chemical modifications which maintain or enhance enzymatic activity is provided. Such nucleic acid is also generally more resistant to nucleases than unmodified nucleic acid. Thus, in a cell and/or in vivo the activity may not be significantly lowered. As exemplified herein such ribozymes are useful in a cell and/or in vivo even if activity over all is reduced 10 fold (Burgin et al., 1996, Biochemistry, 35, 14090). Such ribozymes herein are said to “maintain” the enzymatic activity on all RNA ribozyme.

[0114] In another aspect the nucleic acid molecules comprise a 5′ and/or a 3′-cap structure.

[0115] By “cap structure” is meant chemical modifications, which have been incorporated at the terminus of the oligonucleotide (see for example Wincott et al., WO 97/26270, incorporated by reference herein). These terminal modifications protect the nucleic acid molecule from exonuclease degradation, and may help in delivery and/or localization within a cell. The cap may be present at the 5′-terminus (5′-cap) or at the 3′-terminus (3′-cap) or may be present on both terminus. In non-limiting examples: the 5′-cap is selected from the group comprising inverted abasic residue (moiety), 4′,5′-methylene nucleotide; 1-(beta-D-erythrofuranosyl) nucleotide, 4′-thio nucleotide, carbocyclic nucleotide; 1,5-anhydrohexitol nucleotide; L-nucleotides; alpha-nucleotides; modified base nucleotide; phosphorodithioate linkage; threo-pentofuranosyl nucleotide; acyclic 3′,4′-seco nucleotide; acyclic 3,4-dihydroxybutyl nucleotide; acyclic 3,5-dihydroxypentyl nucleotide, 3′-3′-inverted nucleotide moiety; 3′-3′-inverted abasic moiety; 3′-2′-inverted nucleotide moiety; 3′-2′-inverted abasic moiety; 1,4-butanediol phosphate; 3′-phosphoramidate; hexylphosphate; aminohexyl phosphate; 3′-phosphate; 3′-phosphorothioate; phosphorodithioate; or bridging or non-bridging methylphosphonate moiety (for more details see Beigelman et al., International PCT publication No. WO 97/26270, incorporated by reference herein). In yet another preferred embodiment the 3′-cap is selected from a group comprising, 4′,5′-methylene nucleotide; 1-(beta-D-erythrofuranosyl) nucleotide; 4′-thio nucleotide, carbocyclic nucleotide; 5′-amino-alkyl phosphate; 1,3-diamino-2-propyl phosphate, 3-aminopropyl phosphate; 6-aminohexyl phosphate; 1,2-aminododecyl phosphate; hydroxypropyl phosphate; 1,5-anhydrohexitol nucleotide; L-nucleotide; alpha-nucleotide; modified base nucleotide; phosphorodithioate; threo-pentofuranosyl nucleotide; acyclic 3′,4′-seco nucleotide; 3,4-dihydroxybutyl nucleotide; 3,5-dihydroxypentyl nucleotide, 5′-5′-inverted nucleotide moeity; 5′-5′-inverted abasic moeity; 5′-phosphoramidate; 5′-phosphorothioate; 1,4-butanediol phosphate; 5′-amino; bridging and/or non-bridging 5′-phosphoramidate, phosphorothioate and/or phosphorodithioate, bridging or non bridging methylphosphonate and 5′-mercapto moeities (for more details see Beaucage and Iyer, 1993, Tetrahedron 49, 1925; incorporated by reference herein). By the term “non-nucleotide” is meant any group or compound which can be incorporated into a nucleic acid chain in the place of one or more nucleotide units, including either sugar and/or phosphate substitutions, and allows the remaining bases to exhibit their enzymatic activity. The group or compound is abasic in that it does not contain a commonly recognized nucleotide base, such as adenosine, guanine, cytosine, uracil or thymine.

[0116] An “alkyl” group refers to a saturated aliphatic hydrocarbon, including straight-chain, branched-chain, and cyclic alkyl groups. Preferably, the alkyl group has 1 to 12 carbons. More preferably it is a lower alkyl of from 1 to 7 carbons, more preferably 1 to 4 carbons. The alkyl group may be substituted or unsubstituted. When substituted the substituted group(s) is preferably, hydroxyl, cyano, alkoxy, ═O, ═S, NO₂ or N(CH₃)₂, amino, or SH. The term also includes alkenyl groups which are unsaturated hydrocarbon groups containing at least one carbon-carbon double bond, including straight-chain, branched-chain, and cyclic groups. Preferably, the alkenyl group has 1 to 12 carbons. More preferably it is a lower alkenyl of from 1 to 7 carbons, more preferably 1 to 4 carbons. The alkenyl group may be substituted or unsubstituted. When substituted the substituted group(s) is preferably, hydroxyl, cyano, alkoxy, ═O, ═S, NO₂, halogen, N(CH₃)₂, amino, or SH. The term “alkyl” also includes alkynyl groups which have an unsaturated hydrocarbon group containing at least one carbon-carbon triple bond, including straight-chain, branched-chain, and cyclic groups. Preferably, the alkynyl group has 1 to 12 carbons. More preferably it is a lower alkynyl of from 1 to 7 carbons, more preferably 1 to 4 carbons. The alkynyl group may be substituted or unsubstituted. When substituted the substituted group(s) is preferably, hydroxyl, cyano, alkoxy, ═O, ═S, NO₂ or N(CH₃)₂, amino or SH.

[0117] Such alkyl groups may also include aryl, alkylaryl, carbocyclic aryl, heterocyclic aryl, amide and ester groups. An “aryl” group refers to an aromatic group which has at least one ring having a conjugated p electron system and includes carbocyclic aryl, heterocyclic aryl and biaryl groups, all of which may be optionally substituted. The preferred substituent(s) of aryl groups are halogen, trihalomethyl, hydroxyl, SH, OH, cyano, alkoxy, alkyl, alkenyl, alkynyl, and amino groups. An “alkylaryl” group refers to an alkyl group (as described above) covalently joined to an aryl group (as described above. Carbocyclic aryl groups are groups wherein the ring atoms on the aromatic ring are all carbon atoms. The carbon atoms are optionally substituted. Heterocyclic aryl groups are groups having from 1 to 3 heteroatoms as ring atoms in the aromatic ring and the remainder of the ring atoms are carbon atoms. Suitable heteroatoms include oxygen, sulfur, and nitrogen, and include furanyl, thienyl, pyridyl, pyrrolyl, N-lower alkyl pyrrolo, pyrimidyl, pyrazinyl, imidazolyl and the like, all optionally substituted. An “amide” refers to an —C(O)NH—R, where R is either alkyl, aryl, alkylaryl or hydrogen. An “ester” refers to an —C(O)—OR′, where R is either alkyl, aryl, alkylaryl or hydrogen.

[0118] By “nucleotide” as used herein is as recognized in the art to include natural bases (standard), and modified bases well known in the art. Such bases are generally located at the 1′ position of a nucleotide sugar moiety. Nucleotides generally comprise a base, sugar and a phosphate group. The nucleotides can be unmodified or modified at the sugar, phosphate and/or base moiety, (also referred to interchangeably as nucleotide analogs, modified nucleotides, non-natural nucleotides, non-standard nucleotides and other; see for example, Usman and McSwiggen, supra; Eckstein et al., International PCT Publication No. WO 92/07065; Usman et al., International PCT Publication No. WO 93/15187; Uhlman & Peyman, supra) all are hereby incorporated by reference herein). There are several examples of modified nucleic acid bases known in the art and has recently been summarized by Limbach et al., 1994, Nucleic Acids Res. 22, 2183. Some of the non-limiting examples of base modifications that can be introduced into nucleic acid molecules include, inosine, purine, pyridin-4-one, pyridin-2-one, phenyl, pseudouracil, 2, 4, 6-trimethoxy benzene, 3-methyl uracil, dihydrouridine, naphthyl, aminophenyl, 5-alkylcytidines (e.g., 5-methylcytidine), 5-alkyluridines (e.g., ribothymidine), 5-halouridine (e.g., 5-bromouridine) or 6-azapyrimidines or 6-alkylpyrimidines (e.g. 6-methyluridine), propyne, and others (Burgin et al., 1996, Biochemistry, 35, 14090; Uhlman & Peyman, supra). By “modified bases” in this aspect is meant nucleotide bases other than adenine, guanine, cytosine and uracil at 1′ position or their equivalents; such bases may be used at any position, for example, within the catalytic core of an enzymatic nucleic acid molecule and/or in the substrate-binding regions of the nucleic acid molecule.

[0119] By “abasic” is meant sugar moieties lacking a base or having other chemical groups in place of a base at the 1′ position.

[0120] By “ribonucleotide” is meant a nucleotide with one of the bases adenine, cytosine, guanine, or uracil joined to the 1′ carbon of β-D-ribo-furanose.

[0121] By “unmodified nucleoside” is meant one of the bases adenine, cytosine, guanine, uracil joined to the 1′ carbon of β-D-ribo-furanose.

[0122] By “modified nucleoside” is meant any nucleotide base which contains a modification in the chemical structure of an unmodified nucleotide base, sugar and/or phosphate.

[0123] In connection with 2′-modified nucleotides as described for the present invention, by “amino” is meant 2′-NH₂ or 2′-O—NH₂, which may be modified or unmodified. Such modified groups are described, for example, in Eckstein et al., U.S. Pat. No. 5,672,695 and Matulic-Adamic et al., WO 98/28317, respectively, which are both incorporated by reference in their entireties.

[0124] Various modifications to nucleic acid (e.g., antisense and ribozyme) structure can be made to enhance the utility of these molecules. Such modifications will enhance shelf-life, half-life in vitro, stability, and ease of introduction of such oligonucleotides to the target site, e.g., to enhance penetration of cellular membranes, and confer the ability to recognize and bind to targeted cells.

[0125] Use of these molecules will lead to better treatment of the disease progression by affording the possibility of combination therapies (e.g., multiple ribozymes targeted to different genes, ribozymes coupled with known small molecule inhibitors, or intermittent treatment with combinations of ribozymes (including different ribozyme motifs) and/or other chemical or biological molecules). The treatment of patients with nucleic acid molecules may also include combinations of different types of nucleic acid molecules. Therapies may be devised which include a mixture of ribozymes (including different ribozyme motifs), antisense and/or 2-5A chimera molecules to one or more targets to alleviate symptoms of a disease.

[0126] Administration of Nucleic Acid Molecules

[0127] Methods for the delivery of nucleic acid molecules are described in Akhtar et al., 1992, Trends Cell Bio., 2, 139; and Delivery Strategies for Antisense Oligonucleotide Therapeutics, ed. Akhtar, 1995 which are both incorporated herein by reference. Sullivan et al., PCT WO 94/02595, further describes the general methods for delivery of enzymatic RNA molecules. These protocols may be utilized for the delivery of virtually any nucleic acid molecule. Nucleic acid molecules may be administered to cells by a variety of methods known to those familiar to the art, including, but not restricted to, encapsulation in liposomes, by iontophoresis, or by incorporation into other vehicles, such as hydrogels, cyclodextrins, biodegradable nanocapsules, and bioadhesive microspheres. For some indications, nucleic acid molecules may be directly delivered ex vivo to cells or tissues with or without the aforementioned vehicles. Alternatively, the nucleic acid/vehicle combination is locally delivered by direct injection or by use of a catheter, infusion pump or stent. Other routes of delivery include, but are not limited to, intravascular, intramuscular, subcutaneous or joint injection, aerosol inhalation, oral (tablet or pill form), topical, systemic, ocular, intraperitoneal and/or intrathecal delivery. More detailed descriptions of nucleic acid delivery and administration are provided in Sullivan et al., supra and Draper et al., PCT WO93/23569 which have been incorporated by reference herein.

[0128] The molecules of the instant invention can be used as pharmaceutical agents. Pharmaceutical agents prevent, inhibit the occurrence, or treat (alleviate a symptom to some extent, preferably all of the symptoms) of a disease state in a patient.

[0129] The negatively charged polynucleotides of the invention can be administered (e.g., RNA, DNA or protein) and introduced into a patient by any standard means, with or without stabilizers, buffers, and the like, to form a pharmaceutical composition. When it is desired to use a liposome delivery mechanism, standard protocols for formation of liposomes can be followed. The compositions of the present invention may also be formulated and used as tablets, capsules or elixirs for oral administration; suppositories for rectal administration; sterile solutions; suspensions for injectable administration; and the like.

[0130] The present invention also includes pharmaceutically acceptable formulations of the compounds described. These formulations include salts of the above compounds, e.g., acid addition salts, for example, salts of hydrochloric, hydrobromic, acetic acid, and benzene sulfonic acid.

[0131] A pharmacological composition or formulation refers to a composition or formulation in a form suitable for administration, e.g., systemic administration, into a cell or patient, preferably a human. Suitable forms, in part, depend upon the use or the route of entry, for example oral, transdermal, or by injection. Such forms should not prevent the composition or formulation to reach a target cell (i.e., a cell to which the negatively charged polymer is desired to be delivered to). For example, pharmacological compositions injected into the blood stream should be soluble. Other factors are known in the art, and include considerations such as toxicity and forms which prevent the composition or formulation from exerting its effect.

[0132] By “systemic administration” is meant in vivo systemic absorption or accumulation of drugs in the blood stream followed by distribution throughout the entire body. Administration routes which lead to systemic absorption include, without limitations: intravenous, subcutaneous, intraperitoneal, inhalation, oral, intrapulmonary and intramuscular. Each of these administration routes expose the desired negatively charged polymers, e.g., nucleic acids, to an accessible diseased tissue. The rate of entry of a drug into the circulation has been shown to be a function of molecular weight or size. The use of a liposome or other drug carrier comprising the compounds of the instant invention can potentially localize the drug, for example, in certain tissue types, such as the tissues of the reticular endothelial system (RES). A liposome formulation which can facilitate the association of drug with the surface of cells, such as, lymphocytes and macrophages is also useful. This approach may provide enhanced delivery of the drug to target cells by taking advantage of the specificity of macrophage and lymphocyte immune recognition of abnormal cells, such as the cancer cells.

[0133] The invention also features the use of the composition comprising surface-modified liposomes containing poly (ethylene glycol) lipids (PEG-modified, or long-circulating liposomes or stealth liposomes). These formulations offer an method for increasing the accumulation of drugs in target tissues. This class of drug carriers resists opsonization and elimination by the mononuclear phagocytic system (MPS or RES), thereby enabling longer blood circulation times and enhanced tissue exposure for the encapsulated drug (Lasic et al. Chem. Rev. 1995, 95, 2601-2627; Ishiwata et al., Chem. Pharm. Bull. 1995, 43, 1005-1011). Such liposomes have been shown to accumulate selectively in tumors, presumably by extravasation and capture in the neovascularized target tissues (Lasic et al., Science 1995, 267, 1275-1276; Oku et al., 1995, Biochim. Biophys. Acta, 1238, 86-90). The long-circulating liposomes enhance the pharmacokinetics and pharmacodynamics of DNA and RNA, particularly compared to conventional cationic liposomes which are known to accumulate in tissues of the MPS (Liu et al., J. Biol. Chem. 1995, 42, 24864-24870; Choi et al., International PCT Publication No. WO 96/10391; Ansell et al., International PCT Publication No. WO 96/10390; Holland et al., International PCT Publication No. WO 96/10392; all of these are incorporated by reference herein). Long-circulating liposomes are also likely to protect drugs from nuclease degradation to a greater extent compared to cationic liposomes, based on their ability to avoid accumulation in metabolically aggressive MPS tissues such as the liver and spleen. All of these references are incorporated by reference herein.

[0134] The present invention also includes compositions prepared for storage or administration which include a pharmaceutically effective amount of the desired compounds in a pharmaceutically acceptable carrier or diluent. Acceptable carriers or diluents for therapeutic use are well known in the pharmaceutical art, and are described, for example, in Remington's Pharmaceutical Sciences, Mack Publishing Co. (A. R. Gennaro edit. 1985) hereby incorporated by reference herein. For example, preservatives, stabilizers, dyes and flavoring agents may be provided. These include sodium benzoate, sorbic acid and esters of p-hydroxybenzoic acid. In addition, antioxidants and suspending agents may be used.

[0135] A pharmaceutically effective dose is that dose required to prevent, inhibit the occurrence, or treat (alleviate a symptom to some extent, preferably all of the symptoms) of a disease state. The pharmaceutically effective dose depends on the type of disease, the composition used, the route of administration, the type of mammal being treated, the physical characteristics of the specific mammal under consideration, concurrent medication, and other factors which those skilled in the medical arts will recognize. Generally, an amount between 0.1 mg/kg and 100 mg/kg body weight/day of active ingredients is administered dependent upon potency of the negatively charged polymer.

[0136] The nucleic acid molecules of the present invention may also be administered to a patient in combination with other therapeutic compounds to increase the overall therapeutic effect. The use of multiple compounds to treat an indication may increase the beneficial effects while reducing the presence of side effects.

[0137] Alternatively, certain of the nucleic acid molecules of the instant invention (e.g., formula IV) can be expressed within cells from eukaryotic promoters (e.g., Izant and Weintraub, 1985 Science 229, 345; McGarry and Lindquist, 1986 Proc. Natl. Acad. Sci. USA 83, 399; Scanlon et al., 1991, Proc. Natl. Acad. Sci. USA, 88, 10591-5; Kashani-Sabet et al., 1992 Antisense Res. Dev., 2, 3-15; Dropulic et al., 1992 J. Virol, 66, 1432-41; Weerasinghe et al., 1991 J. Virol, 65, 5531-4; Ojwang et al., 1992 Proc. Natl. Acad. Sci. USA 89, 10802-6; Chen et al., 1992 Nucleic Acids Res., 20, 4581-9; Sarver et al., 1990 Science 247, 1222-1225; Thompson et al., 1995 Nucleic Acids Res. 23, 2259; Good et al., 1997, Gene Therapy, 4, 45; all of the references are hereby incorporated in their totality by reference herein). Those skilled in the art realize that any nucleic acid can be expressed in eukaryotic cells from the appropriate DNA/RNA vector. The activity of such nucleic acids can be augmented by their release from the primary transcript by a ribozyme (Draper et al., PCT WO 93/23569, and Sullivan et al., PCT WO 94/02595; Ohkawa et al., 1992 Nucleic Acids Symp. Ser., 27, 15-6; Taira et al., 1991, Nucleic Acids Res., 19, 5125-30; Ventura et al., 1993 Nucleic Acids Res., 21, 3249-55; Chowrira et al., 1994 J. Biol. Chem. 269, 25856; all of the references are hereby incorporated in their totality by reference herein).

[0138] In another aspect of the invention, RNA molecules of the present invention are preferably expressed from transcription units (see for example Couture et al., 1996, TIG., 12, 510) inserted into DNA or RNA vectors. The recombinant vectors are preferably DNA plasmids or viral vectors. Ribozyme expressing viral vectors could be constructed based on, but not limited to, adeno-associated virus, retrovirus, adenovirus, or alphavirus. Preferably, the recombinant vectors capable of expressing the nucleic acid molecules are delivered as described above, and persist in target cells. Alternatively, viral vectors may be used that provide for transient expression of nucleic acid molecules. Such vectors might be repeatedly administered as necessary. Once expressed, the nucleic acid molecule binds to the target mRNA. Delivery of nucleic acid molecule expressing vectors could be systemic, such as by intravenous or intramuscular administration, by administration to target cells explanted from the patient followed by reintroduction into the patient, or by any other means that would allow for introduction into the desired target cell (for a review see Couture et al., 1996, TIG., 12, 510).

[0139] In one aspect the invention features, an expression vector comprising nucleic acid sequence encoding at least one of the nucleic acid molecules of the instant invention is disclosed. The nucleic acid sequence encoding the nucleic acid molecule of the instant invention is operable linked in a manner which allows expression of that nucleic acid molecule.

[0140] In another aspect the invention features, the expression vector comprises: a transcription initiation region (e.g., eukaryotic pol I, II or III initiation region); b) a transcription termination region (e.g., eukaryotic pol I, II or III termination region); c) a gene encoding at least one of the nucleic acid catalyst of the instant invention; and wherein said gene is operably linked to said initiation region and said termination region, in a manner which allows expression and/or delivery of said nucleic acid molecule. The vector may optionally include an open reading frame (ORF) for a protein operably linked on the 5′ side or the 3′-side of the gene encoding the nucleic acid catalyst of the invention; and/or an intron (intervening sequences).

[0141] Transcription of the nucleic acid molecule sequences are driven from a promoter for eukaryotic RNA polymerase I (pol I), RNA polymerase II (pol II), or RNA polymerase III (pol III). Transcripts from pol II or pol III promoters will be expressed at high levels in all cells; the levels of a given pol II promoter in a given cell type will depend on the nature of the gene regulatory sequences (enhancers, silencers, etc.) present nearby. Prokaryotic RNA polymerase promoters are also used, providing that the prokaryotic RNA polymerase enzyme is expressed in the appropriate cells (Elroy-Stein and Moss, 1990 Proc. Natl. Acad. Sci. USA, 87, 6743-7; Gao and Huang 1993 Nucleic Acids Res., 21, 2867-72; Lieber et al., 1993 Methods Enzymol., 217, 47-66; Zhou et al., 1990 Mol. Cell. Biol., 10, 4529-37). Several investigators have demonstrated that nucleic acid molecules, such as ribozymes expressed from such promoters can function in mammalian cells (e.g. Kashani-Sabet et al., 1992 Antisense Res. Dev., 2, 3-15; Ojwang et al., 1992 Proc. Natl. Acad. Sci. USA, 89, 10802-6; Chen et al., 1992 Nucleic Acids Res., 20, 4581-9; Yu et al., 1993 Proc. Natl. Acad. Sci. USA, 90, 6340-4; L'Huillier et al., 1992 EMBO J. 11, 4411-8; Lisziewicz et al., 1993 Proc. Natl. Acad. Sci. U.S.A., 90, 80004; Thompson et al., 1995 Nucleic Acids Res. 23, 2259; Sullenger & Cech, 1993, Science, 262, 1566). More specifically, transcription units such as the ones derived from genes encoding U6 small nuclear (snRNA), transfer RNA (tRNA) and adenovirus VA RNA are useful in generating high concentrations of desired RNA molecules such as ribozymes in cells (Thompson et al., supra; Couture and Stinchcomb, 1996, supra; Noonberg et al., 1994, Nucleic Acid Res., 22, 2830; Noonberg et al., U.S. Pat. No. 5,624,803; Good et al., 1997, Gene Ther. 4, 45; Beigelman et al., International PCT Publication No. WO 96/18736; all of these publications are incorporated by reference herein. The above ribozyme transcription units can be incorporated into a variety of vectors for introduction into mammalian cells, including but not restricted to, plasmid DNA vectors, viral DNA vectors (such as adenovirus or adeno-associated virus vectors), or viral RNA vectors (such as retroviral or alphavirus vectors) (for a review see Couture and Stinchcomb, 1996, supra).

[0142] In yet another aspect the invention features an expression vector comprising nucleic acid sequence encoding at least one of the nucleic acid molecules of the invention, in a manner which allows expression of that nucleic acid molecule. The expression vector comprises in one embodiment; a) a transcription initiation region; b) a transcription termination region; c) a gene encoding at least one said nucleic acid molecule; and wherein said gene is operably linked to said initiation region and said termination region, in a manner which allows expression and/or delivery of said nucleic acid molecule. In another preferred embodiment the expression vector comprises: a) a transcription initiation region; b) a transcription termination region; c) an open reading frame; d) a gene encoding at least one said nucleic acid molecule, wherein said gene is operably linked to the 3′-end of said open reading frame; and wherein said gene is operably linked to said initiation region, said open reading frame and said termination region, in a manner which allows expression and/or delivery of said nucleic acid molecule. In yet another embodiment the expression vector comprises: a) a transcription initiation region; b) a transcription termination region; c) an intron; d) a gene encoding at least one said nucleic acid molecule; and wherein said gene is operably linked to said initiation region, said intron and said termination region, in a manner which allows expression and/or delivery of said nucleic acid molecule. In another embodiment, the expression vector comprises: a) a transcription initiation region; b) a transcription termination region; c) an intron; d) an open reading frame; e) a gene encoding at least one said nucleic acid molecule, wherein said gene is operably linked to the 3′-end of said open reading frame; and wherein said gene is operably linked to said initiation region, said intron, said open reading frame and said termination region, in a manner which allows expression and/or delivery of said nucleic acid molecule.

### EXAMPLE

[0143] The following are non-limiting examples showing the selection, isolation, synthesis and activity of nucleic acids of the instant invention.

[0144] The following examples demonstrate the selection and design of Antisense, hammerhead, DNAzyme, NCH, or G-Cleaver ribozyme molecules and binding/cleavage sites within TERT RNA.

### Example 1

[0145] Identification of Potential Target Sites in Human TERT RNA

[0146] The sequence of human TERT was screened for accessible sites using a computer folding algorithm. Regions of the RNA that did not form secondary folding structures and contained potential ribozyme and/or antisense binding/cleavage sites were identified. The sequences of these cleavage sites are shown in tables III-VII.

### Example 2

[0147] Selection of Enzymatic Nucleic Acid Cleavage Sites in Human TERT RNA

[0148] To test whether the sites predicted by the computer-based RNA folding algorithm corresponded to accessible sites in TERT RNA, 10 hammerhead ribozyme and three G-Cleaver ribozyme sites were selected for further analysis (Table VI). Ribozyme target sites were chosen by analyzing sequences of Human TERT (Nakamura et al., 1997 Science 277, 955-959; Genbank sequence accession number: NM_{—}003219) and prioritizing the sites on the basis of folding. Ribozymes were designed that could bind each target and were individually analyzed by computer folding (Christoffersen et al., 1994 J. Mol. Struc. Theochem, 311, 273; Jaeger et al., 1989, Proc. Natl. Acad. Sci. USA, 86, 7706) to assess whether the ribozyme sequences fold into the appropriate secondary structure. Those ribozymes with unfavorable intramolecular interactions between the binding arms and the catalytic core were eliminated from consideration. As noted below, varying binding arm lengths can be chosen to optimize activity. Generally, at least 5 bases on each arm are able to bind to, or otherwise interact with, the target RNA.

### Example 3

[0149] Chemical Synthesis and Purification of Ribozymes for Efficient Cleavage of TERT RNA

[0150] Ribozymes were designed to anneal to various sites in the RNA message. The binding arms are complementary to the target site sequences described above. The ribozymes were chemically synthesized. The method of synthesis used followed the procedure for normal RNA synthesis as described above and in Usman et al., (1987 J. Am. Chem. Soc., 109, 7845), Scaringe et al., (1990 Nucleic Acids Res., 18, 5433) and Wincott et al., supra, and made use of common nucleic acid protecting and coupling groups, such as dimethoxytrityl at the 5′-end, and phosphoramidites at the 3′-end. The average stepwise coupling yields were >98%.

[0151] Ribozymes were also synthesized from DNA templates using bacteriophage T7 RNA polymerase (Milligan and Uhlenbeck, 1989, Methods Enzymol. 180, 51). Ribozymes were purified by gel electrophoresis using general methods or were purified by high pressure liquid chromatography (HPLC; See Wincott et al., supra; the totality of which is hereby incorporated herein by reference) and were resuspended in water. The sequences of the chemically synthesized ribozymes used in this study are shown below in Table III-VII.

### Example 4

[0152] Ribozyme Cleavage of TERT RNA Target In Vitro

[0153] Ribozymes targeted to the human TERT RNA are designed and synthesized as described above. These ribozymes can be tested for cleavage activity in vitro, for example using the following procedure. The target sequences and the nucleotide location within the TERT RNA are given in Tables III-VII.

[0154] Cleavage Reactions: Full-length or partially full-length, internally-labeled target RNA for ribozyme cleavage assay is prepared by in vitro transcription in the presence of [a-³²p] CTP, passed over a G 50 Sephadex column by spin chromatography and used as substrate RNA without further purification. Alternately, substrates are 5′-³²P-end labeled using T4 polynucleotide kinase enzyme. Assays are performed by pre-warming 15 μl of a 2× concentration of purified ribozyme in ribozyme cleavage buffer (50 mM Tris-HCl, pH 7.5 at 37° C., 10 mM MgCl₂) and the cleavage reaction was initiated by adding the 2× ribozyme mix to an equal volume (15 μl) of substrate RNA (maximum of 1-5 nM; 5×10⁵ to 1×10⁷ cpm) that was also pre-warmed in cleavage buffer. As an initial screen, assays are carried out for 1 hour at 37° C. using a final concentration of either 40 nM or 1 mM ribozyme, i.e., ribozyme excess. The reaction is quenched by the addition of an equal volume (30 μl) of 95% formamide, 20 mM EDTA, 0.05% bromophenol blue and 0.05% xylene cyanol after which the sample is heated to 95° C. for 2 minutes, quick chilled and loaded onto a denaturing polyacrylamide gel. Substrate RNA and the specific RNA cleavage products generated by ribozyme cleavage are visualized on an autoradiograph of the gel. The percentage of cleavage is determined by Phosphor Imager® quantitation of bands representing the intact substrate and the cleavage products.

[0155] Cell Culture Models

[0156] Various methods have been developed to assay telomerase activity in vitro. The most widely used method to characterize telomerase activity is the telomeric repeat amplification protocol (TRAP). TRAP utilizes RT-PCR of cellular extracts to measure telomerase activity by making the amount of PCR target dependant upon the biochemical activity of the enzyme (Kim, N. W., 1997, Nucleic Acids Research, 25, 2595-2597).

[0157] Human cell culture studies have been established to assay inhibition of telomerase activity in human carcinomas responding to various therapeutics. A human breast cancer model for studying telomerase inhibitors is described (Raymond, E., 1999, Br. J. Cancer, 80, 1332-1341). Human studies of telomerase expression as related to various other cancers are described including cervical cancer (Nakano, K., 1998, Am. J. Pathol, 153, 857-864), endometrial cancer (Kyo, S., 1999, Int. J. Cancer, 80, 60-63), meningeal carcinoma (Kleinschmidt-DeMasters, B. K., 1998, J. Neurol. Sci., 161, 124-134), lung carcinoma (Yashima, K., 1997, Cancer Reseach, 57, 2372-2377), testicular cancer in response to cisplatin (Burger, A. M., 1997, Eur. J. Cancer, 33, 638-644), and ovarian carcinoma (Counter, C. M., 1994, Proc. Natl. Acad. Sci., 91, 2900-2904).

[0158] Animal Models

[0159] A variety of animal models have been designed to assay telomerase activity in vivo. Inhibition of telomerase activity has been analyzed in rats via cell proliferation studies with MNU (N-methyl-N-nitosurea) induced mammary carcinomas in response to treatment with 4-(hydroxyphenyl)retinamide (4-HPR), a known inhibitor of mammary carcinogenesis in animal models and premenopausal women (Bednarek, A., 1999, Carcinogenesis, 20, 879-883). The method of Bednarek et al. uses N-methyl-N-nitrosourea (MNU)-induced mammary carcinomas in rats to analyze the effect of telomerase inhibitors in vivo. MNU-induced tumors express high telomerase activity. Female virgin Sprague-Dawley rats are injected twice with MNU (50 mg/kg body weight) at days 43 and 50 days of age. Mammary tumors are allowed to grow to 4-8 mm before commencing treatment with an agent, such as 4-(hydroxyphenyl) retinamide (used by Bednarek et al.) or a nucleic acid of the invention being tested as a modulator of telomerase activity. Following treatment with an agent for 0 to 6 weeks, telomerase activity is assayed using the TRAP method on CHAPS-extracted tumor-cell protein samples. A decrease of 10% or more in telomerase activity relative to the level in tumors of untreated animals indicates an agent is a telomerase inhibitor. Additional studies have focused on the up-regulation of telomerase in transformed cell lines from animal and human model systems (Zhang, P. B., 1998, Leuk. Res., 22, 509-516), (Chadeneau, C., 1995, Oncogene, 11, 893-898), (Greenberg, R., 1999, Oncogene, 18, 1219-1226).

[0160] Indications

[0161] Particular degenerative and disease states that can be associated with telomerase expression modulation include but are not limited to:

[0162] Cancer: Almost all human tumors have detectable telomerase activity (Shay, J. W., 1997, Eur. J. Cancer, 33, 787-791). Treatment with telomerase inhibitors may provide effective cancer therapy with minimal side effects in normal somatic cells that lack telomerase activity. The therapeutic potential exists for the treatment of a wide variety of cancer types.

[0163] Restinosis: Telomerase inhibition in vascular smooth muscle cells may inhibit restinosis by limiting proliferation of these cells.

[0164] Infectious disease: Telomerase inhibition in infectious cell types that express telomerase activity may provide selective antibiotic activity. Such treatment may prove especially effective in protozoan-based infection such as Giardia and Leishmaniasis.

[0165] Transplant rejection: Telomerase inhibition in endothelial cell types may demonstrate selective immunnosuppressant activity. Activation of telomerase in transplant cells could benefit grafting success through increased proliferative potential.

[0166] Autoimmune disease: Telomerase modulation in various immune cells may prove beneficial in treating diseases such as multiple sclerosis, lupus, and AIDS.

[0167] Age related disease: Activation of telomerase expression in cells at or nearing senescence as a result of advanced age or premature aging could benefit conditions such as macular degeneration, skin ulceration, and rheumatoid arthritis.

[0168] The present body of knowledge in telomerase research indicates the need for methods to assay telomerase activity and for compounds that can regulate telomerase expression for research, diagnostic, and therapeutic use.

[0169] Gemcytabine and cyclophosphamide are non-limiting examples of chemotherapeutic agents that can be combined with or used in conjunction with the nucleic acid molecules (e.g. ribozymes and antisense molecules) of the instant invention. Those skilled in the art will recognize that other drugs such as anti-cancer compounds and therapies can be similarly be readily combined with the nucleic acid molecules of the instant invention (e.g. ribozymes and antisense molecules) and are hence within the scope of the instant invention. Such compounds and therapies are well known in the art (see for example Cancer: Principles and Pranctice of Oncology, Volumes 1 and 2, eds Devita, V. T., Hellman, S., and Rosenberg, S. A., J. B. Lippincott Company, Philadelphia, USA; incorporated herein by reference) and include, without limitations, antifolates; fluoropyrimidines; cytarabine; purine analogs; adenosine analogs; amsacrine; topoisomerase I inhibitors; anthrapyrazoles; retinoids; antibiotics such as bleomycin, anthacyclins, mitomycin C, dactinomycin, and mithramycin; hexamethylmelamine; dacarbazine; I-asperginase; platinum analogs; alkylating agents such as nitrogen mustard, melphalan, chlorambucil, busulfan, ifosfamide, 4-hydroperoxycyclophosphamide, nitrosoureas, thiotepa; plant derived compounds such as vinca alkaloids, epipodophyllotoxins, taxol; Tomaxifen; radiation therapy; surgery; nutritional supplements; gene therapy; radiotherapy such as 3D-CRT; immunotoxin therapy such as ricin, monoclonal antibodies herceptin; and the like. For combination therapy, the nucleic acids of the invention are prepared in one of two ways. First, the agents are physically combined in a preparation of nucleic acid and chemotherapeutic agent, such as a mixture of a nucleic acid of the invention encapsulated in liposomes and ifosfamide in a solution for intravenous administration, wherein both agents are present in a therapeutically effective concentration (e.g., ifosfamide in solution to deliver 1000-1250 mg/m2/day and liposome-associated nucleic acid of the invention in the same solution to deliver 0.1-100 mg/kg/day). Alternatively, the agents are administered separately but simultaneously in their respective effective doses (e.g., 1000-1250 mg/m2/d ifosfamide and 0.1 to 100 mg/kg/day nucleic acid of the invention).

[0170] Diagnostic Uses

[0171] The nucleic acid molecules of this invention (e.g., ribozymes) may be used as diagnostic tools to examine genetic drift and mutations within diseased cells or to detect the presence of TERT RNA in a cell. The close relationship between ribozyme activity and the structure of the target RNA allows the detection of mutations in any region of the molecule which alters the base-pairing and three-dimensional structure of the target RNA. By using multiple ribozymes described in this invention, one may map nucleotide changes which are important to RNA structure and function in vitro, as well as in cells and tissues. Cleavage of target RNAs with ribozymes may be used to inhibit gene expression and define the role (essentially) of specified gene products in the progression of disease. In this manner, other genetic targets may be defined as important mediators of the disease. These experiments will lead to better treatment of the disease progression by affording the possibility of combinational therapies (e.g., multiple ribozymes targeted to different genes, ribozymes coupled with known small molecule inhibitors, or intermittent treatment with combinations of ribozymes and/or other chemical or biological molecules). Other in vitro uses of ribozymes of this invention are well known in the art, and include detection of the presence of mRNAs associated with TERT-related condition. Such RNA is detected by determining the presence of a cleavage product after treatment with a ribozyme using standard methodology.

[0172] In a specific example, ribozymes which can cleave only wild-type or mutant forms of the target RNA are used for the assay. The first ribozyme is used to identify wild-type RNA present in the sample and the second ribozyme will be used to identify mutant RNA in the sample. As reaction controls, synthetic substrates of both wild-type and mutant RNA will be cleaved by both ribozymes to demonstrate the relative ribozyme efficiencies in the reactions and the absence of cleavage of the “non-targeted” RNA species. The cleavage products from the synthetic substrates will also serve to generate size markers for the analysis of wild-type and mutant RNAs in the sample population. Thus each analysis will require two ribozymes, two substrates and one unknown sample which will be combined into six reactions. The presence of cleavage products will be determined using an RNAse protection assay so that full-length and cleavage fragments of each RNA can be analyzed in one lane of a polyacrylamide gel. For example, the cleavage reactions are performed in ribozyme cleavage buffer with a final reaction volume of 30 μl per reaction as follows: 1) ribozyme specific for (i.e., that specifically cleaves) wild-type RNA (wt ribozyme; 40 nM final reaction concentration) is incubated with wild type substrate (1-5 nM final reaction concentration) at 37° C. for one hour; 2) wt ribozyme is incubated with mutant substrate (same conditions); 3) wt ribozyme (40 nM final concentration) is incubated with 50 μg of total RNA from the individual being tested, at 37° C. for one hour; 4) same as (1), only with 40 nM final concentration of ribozyme specific for mutant RNA; 5) same as (2), only with ribozyme specific for mutant RNA; and 6) same as (3), only with ribozyme specific for mutant RNA. Cleavage products are precipitated with ethanol and resuspended in 20 μl of hybridization buffer for RNAse protection with 5×10⁵ to 1×10⁷ cpm of ³²P-labeled RNA probe. Hybridization buffer consists of the following (per reaction): 24 μl Formamide, 2 μl 0.6M PIPES, 2.4 μl 5M NaCl, 0.3 μl 0.1M EDTA, and DEPC-treated water to 30 μl. Samples are heated at 95° C. for 10 minutes, then incubated 4 hours at 55° C. (hybridization temperatures may be estimated by one of skill in the art and optimized empirically for a given probe:target combination without undue experimentation). Following hybridization, hybridized sequences are digested with ribonucleases by the addition of 350 μl of RNase digestion buffer (300 mM NaOAc, 10 mM Tris, 5 mM EDTA) followed by addition of 1 μl of 4 mg/ml RNase A and 0.4 μl of 10 u/μl RNase T1. Digestion is carried out for 45 minutes to 1 hour at 30° C., followed by the addition of 10 μl of 20% SDS and 2.5 μl of 10mg/ml Proteinase K. Samples are incubated at 37° C. for 15-20 minutes followed by phenol/chloroform/isoamyl alcohol (25:24:1) extraction and precipitation with ethanol. Samples are resuspended in formamide loading buffer, heat denatured and electrophoresed on a denaturing polyacrylamide gel. Protected cleavage products are visualized by autoradiography and quantitated by phosphorimager analysis. It is not absolutely required to quantify the results to gain insight into the expression of mutant RNAs and putative risk of the desired phenotypic changes in target cells. The expression of mRNA whose protein product is implicated in the development of the phenotype (i.e., TERT) is adequate to establish risk. If probes of comparable specific activity are used for both transcripts, then a qualitative comparison of RNA levels will be adequate and will decrease the cost of the initial diagnosis. Higher mutant form to wild-type ratios will be correlated with higher risk whether RNA levels are compared qualitatively or quantitatively.

[0173] Additional Uses

[0174] Potential usefulness of sequence-specific enzymatic nucleic acid molecules of the instant invention might have many of the same applications for the study of RNA that DNA restriction endonucleases have for the study of DNA (Nathans et al., 1975 Ann. Rev. Biochem. 44:273). For example, the pattern of restriction fragments could be used to establish sequence relationships between two related RNAs, and large RNAs could be specifically cleaved to fragments of a size more useful for study. The ability to engineer sequence specificity of the enzymatic nucleic acid molecule is ideal for cleavage of RNAs of unknown sequence. Applicant describes the use of nucleic acid molecules to down-regulate gene expression of target genes in bacterial, microbial, fungal, viral, and eukaryotic systems including plant, or mammalian cells.

[0175] All patents and publications mentioned in the specification are indicative of the levels of skill of those skilled in the art to which the invention pertains. All references cited in this disclosure are incorporated by reference to the same extent as if each reference had been incorporated by reference in its entirety individually.

[0176] One skilled in the art would readily appreciate that the present invention is well adapted to carry out the objects and obtain the ends and advantages mentioned, as well as those inherent therein. The methods and compositions described herein as presently representative of preferred embodiments are exemplary and are not intended as limitations on the scope of the invention. Changes therein and other uses will occur to those skilled in the art, which are encompassed within the spirit of the invention, are defined by the scope of the claims.

[0177] It will be readily apparent to one skilled in the art that varying substitutions and modifications may be made to the invention disclosed herein without departing from the scope and spirit of the invention. Thus, such additional embodiments are within the scope of the present invention and the following claims.

[0178] The invention illustratively described herein suitably may be practiced in the absence of any element or elements, limitation or limitations which is not specifically disclosed herein. Thus, for example, in each instance herein any of the terms “comprising”, “consisting essentially of” and “consisting of” may be replaced with either of the other two terms. The terms and expressions which have been employed are used as terms of description and not of limitation, and there is no intention that in the use of such terms and expressions of excluding any equivalents of the features shown and described or portions thereof, but it is recognized that various modifications are possible within the scope of the invention claimed. Thus, it should be understood that although the present invention has been specifically disclosed by preferred embodiments, optional features, modification and variation of the concepts herein disclosed may be resorted to by those skilled in the art, and that such modifications and variations are considered to be within the scope of this invention as defined by the description and the appended claims.

[0179] In addition, where features or aspects of the invention are described in terms of Markush groups or other grouping of alternatives, those skilled in the art will recognize that the invention is also thereby described in terms of any individual member or subgroup of members of the Markush group or other group.

[0180] Other embodiments are within the following claims.

TABLE I
Characteristics of naturally occurring ribozymes

Group I Introns
Size: ˜150 to >1000 nucleotides.
Requires a U in the target sequence immediately 5′ of the cleavage site.
Binds 4-6 nucleotides at the 5′-side of the cleavage site.
Reaction mechanism: attack by the 3′-OH of guanosine to
generate cleavage products with 3′-OH and 5′-guanosine.
Additional protein cofactors required in some cases to help folding and
maintainance of the active structure.
Over 300 known members of this class. Found as an intervening sequence
in Tetrahymena thermophila rRNA, fungal mitochondria, chloroplasts,
phage T4, blue-green algae, and others.
Major structural features largely established through phylogenetic
comparisons, mutagenesis, and biochemical studies [^{i,ii}].
Complete kinetic framework established for one ribozyme [^{iii,iv,v,vi}].
Studies of ribozyme folding and substrate docking underway [^{vii,viii,ix}].
Chemical modification investigation of important residues well
established [^{x,xi}].
The small (4-6 nt) binding site may make this ribozyme too non-specific
for targeted RNA cleavage, however, the Tetrahymena group I intron has
been used to repair a “defective” β-galactosidase message by the ligation
of new β-galactosidase sequences onto the defective message [^{xii}].
RNAse P RNA (M1 RNA)
Size: ˜290 to 400 nucleotides.
RNA portion of a ubiquitous ribonucleoprotein enzyme.
Cleaves tRNA precursors to form mature tRNA [^{xiii}].
Reaction mechanism: possible attack by M²⁺-OH to generate
cleavage products with 3′-OH and 5′-phosphate.
RNAse P is found throughout the prokaryotes and eukaryotes. The RNA
subunit has been sequenced from bacteria, yeast, rodents, and primates.
Recruitment of endogenous RNAse P for therapeutic applications is
possible through hybridization of an External Guide Sequence (EGS) to
the target RNA [^{xiv,xv}]
Important phosphate and 2′ OH contacts recently identified [^{xvi,xvii}]
Group II Introns
Size: >1000 nucleotides.
Trans cleavage of target RNAs recently demonstrated [^{xviii,xix}].
Sequence requirements not fully determined.
Reaction mechanism: 2′-OH of an internal adenosine generates cleavage
products with 3′-OH and a “lariat” RNA containing a 3-5′ and a 2′-5′
branch point.
Only natural ribozyme with demonstrated participation in DNA
cleavage [^{xx,xxi}] in addition to RNA cleavage and ligation.
Major structural features largely established through phylogenetic
comparisons [^{xxii}].
Important 2′ OH contacts beginning to be identified [^{xxiii}]
Kinetic framework under development [^{xxiv}]
Neurospora VS RNA
Size: ˜144 nucleotides.
Trans cleavage of hairpin target RNAs recently demonstrated [^{xxv}].
Sequence requirements not fully determined.
Reaction mechanism: attack by 2′-OH 5′ to the scissile bond to generate
cleavage products with 2′,3′-cyclic phosphate and 5′-OH ends.
Binding sites and structural requirements not fully determined.
Only 1 known member of this class. Found in Neurospora VS RNA.
Hammerhead Ribozyme
(see text for references)
Size: ˜13 to 40 nucleotides.
Requires the target sequence UH immediately 5′ of the cleavage site.
Binds a variable number nucleotides on both sides of the cleavage site.
Reaction mechanism: attack by 2′-OH 5′ to the scissile bond to generate
cleavage products with 2′,3′-cyclic phosphate and 5′-OH ends.
14 known members of this class. Found in a number of plant pathogens
(virusoids) that use RNA as the infectious agent.
Essential structural features largely defined, including 2 crystal
structures [^{xxvi,xxvii}]
Minimal ligation activity demonstrated (for engineering through in vitro
selection) [^{xxviii}]
Complete kinetic framework established for two or more ribozymes [^{xxix}].
Chemical modification investigation of important residues well
established [^{xxx}].
Hairpin Ribozyme
Size: ˜50 nucleotides.
Requires the target sequence GUC immediately 3′ of the cleavage site.
Binds 4-6 nucleotides at the 5′-side of the cleavage site and a variable
number to the 3′-side of the cleavage site.
Reaction mechanism: attack by 2′-OH 5′ to the scissile bond to generate
cleavage products with 2′,3′-cyclic phosphate and 5′-OH ends.
3 known members of this class. Found in three plant pathogen (satellite
RNAs of the tobacco ringspot virus, arabis mosaic virus and chicory
yellow mottle virus) which uses RNA as the infectious agent.
Essential structural features largely defined [^{xxxi,xxxii,xxxiii,xxxiv}]
Ligation activity (in addition to cleavage activity) makes ribozyme
amenable to engineering through in vitro selection [^{xxxv}]
Complete kinetic framework established for one ribozyme [^{xxxvi}].
Chemical modification investigation of important residues
begun [^{xxxvii,xxxviii}].
Hepatitis Delta Virus (HDV) Ribozym
Size: ˜60 nucleotides.
Trans cleavage of target RNAs demonstrated [^{xxxix}].
Binding sites and structural requirements not fully determined, although
no sequences 5′ of cleavage site are required. Folded ribozyme contains a
pseudoknot structure [^{xl}].
Reaction mechanism: attack by 2′-OH 5′ to the scissile bond to generate
cleavage products with 2′,3′-cyclic phosphate and 5′-OH ends.
Only 2 known members of this class. Found in human HDV.
Circular form of HDV is active and shows increased nuclease stability [^{xli}]
[ⁱ] Michel, Francois; Westhof, Eric. Slippery substrates. Nat. Struct. Biol. (1994), 1(1), 5-7.
[ⁱⁱ] Lisacek, Frederique; Diaz, Yalande; Michel, Francois. Automatic identification of group I intron cores in genomic DNA sequences. J. Mol. Biol. (1994), 235(4), 1206-17.
[ⁱⁱⁱ] Herschlag, Daniel; Cech, Thomas R.. Catalysis of RNA cleavage by the Tetrahymena thermophila ribozyme. 1. Kinetic description of the reaction of an RNA substrate complementary to the active site. Biochemistry (1990), 29(44), 10159-71.
[^{iv}] Herschlag, Daniel; Cech, Thomas R.. Catalysis of RNA cleavage by the Tetrahymena thermophila ribozyme. 2. Kinetic description of the reaction of an RNA substrate that forms a mismatch at the active site. Biochemistry (1990), 29(44), 10172-80.
[^{v}] Knitt, Deborah S.; Herschlag, Daniel. pH Dependencies of the Tetrahymena Ribozyme Reveal an Unconventional Origin of an Apparent pKa. Biochemistry (1996), 35(5), 1560-70.
[^{vi}] Bevilacqua, Philip C.; Sugimoto, Naoki; Turner, Douglas H.. A mechanistic framework for the second step of splicing catalyzed by the Tetrahymena ribozyme. Biochemistry (1996), 35(2), 648-58.
[^{vii}] Li, Yi; Bevilacqua, Philip C.; Mathews, David; Turner, Douglas H.. Thermodynamic and activation parameters for binding of a pyrene-labeled substrate by the Tetrahymena ribozyme: docking is not diffusion-controlled and is driven by a favorable entropy change. Biochemistry (1995), 34(44), 14394-9.
[^{viii}] Banerjee, Aloke Raj; Turner, Douglas H.. The time dependence of chemical modification reveals slow steps in the folding of a group I ribozyme. Biochemistry (1995), 34(19), 6504-12.
[^{ix}] Zarrinkar, Patrick P.; Williamson, James R.. The P9.1-P9.2 peripheral extension helps guide folding of the Tetrahymena ribozyme. Nucleic Acids Res. (1996), 24(5), 854-8.
[^{x}] Strobel, Scott A.; Cech, Thomas R.. Minor groove recognition of the conserved G.cntdot.U pair at the Tetrahymena ribozyme reaction site. Science (Washington, D.C.) (1995), 267(5198), 675-9.
[^{xi}] Strobel, Scott A.; Cech, Thomas R.. Exocyclic Amine of the Conserved G.cntdot.U Pair at the Cleavage Site of the Tetrahymena Ribozyme Contributes to 5′-Splice Site Selection and Transition State Stabilization. Biochemistry (1996), 35(4), 1201-11.
[^{xii}] Sullenger, Bruce A.; Cech, Thomas R.. Ribozyme-mediated repair of defective mRNA by targeted trans-splicing. Nature (London) (1994), 371(6498), 619-22.
[^{xiii}] Robertson, H. D.; Altman, S.; Smith, J. D. J. Biol Chem., 247, 5243-5251 (1972).
[^{xiv}] Forster, Anthony C.; Altman, Sidney. External guide sequences for an RNA enzyme. Science (Washington, D.C., 1883-) (1990), 249(4970), 783-6.
[^{xv}] Yuan, Y.; Hwang, E. S.; Altman, S. Targeted cleavage of mRNA by human RNase P. Proc. Natl. Acad. Sci. USA (1992) 89, 8006-10.
[^{xvi}] Harris, Michael E.; Pace, Norman R.. Identification of phosphates involved in catalysis by the ribozyme RNase P RNA. RNA (1995), 1(2), 210-18.
[^{xvii}] Pan, Tao; Loria, Andrew; Zhong, Kun. Probing of tertiary interactions in RNA: 2′-hydroxyl-base contacts between the RNase P RNA and pre-tRNA. Proc. Natl. Acad. Sci. U.S.A. (1995), 92(26), 12510-14.
[^{xviii}] Pyle, Anna Marie; Green, Justin B.. Building a Kinetic Framework for Group II Intron Ribozyme Activity: Quantitation of Interdomain Binding and Reaction Rate. Biochemistry (1994), 33(9), 2716-25.
[^{xix}] Michels, William J. Jr.; Pyle, Anna Marie. Conversion of a Group II Intron into a New Multiple-Turnover Ribozyme that Selectively Cleaves Oligonucleotides: Elucidation of Reaction Mechanism and Structure/Function Relationships. Biochemistry (1995), 34(9), 2965-77.
[^{xx}] Zimmerly, Steven; Guo, Huatao; Eskes, Robert; Yang, Jian; Perlman, Philip S.; Lambowitz, Alan M.. A group II intron RNA is a catalytic component of a DNA endonuclease involved in intron mobility. Cell (Cambridge, Mass.) (1995), 83(4), 529-38.
[^{xxi}] Griffin, Edmund A., Jr.; Qin, Zhifeng; Michels, Williams J., Jr.; Pyle, Anna Marie. Group II intron ribozymes that cleave DNA and RNA linkages with similar efficiency, and lack contacts with substrate 2′-hydroxyl groups. Chem. Biol. (1995), 2(11), 761-70.
[^{xxii}] Michel, Francois; Ferat, Jean Luc. Structure and activities of group II introns. Annu. Rev. Biochem. (1995), 64, 435-61.
[^{xxiii}] Abramovitz, Dana L.; Friedman, Richard A.; Pyle, Anna Marie. Catalytic role of 2′-hydroxyl groups within a group II intron active site. Science (Washington, D.C.) (1996), 271(5254), 1410-13.
[^{xxiv}] Daniels, Danette L.; Michels, William J., Jr.; Pyle, Anna Marie. Two competing pathways for self-splicing by group II introns: a quantitative analysis of in vitro reaction rates and products. J. Mol. Biol. (1996), 256(1), 31-49.
[^{xxv}] Guo, Hans C. T.; Collins, Richard A.. Efficient trans-cleavage of a stem-loop RNA substrate by a ribozyme derived from Neurospora VS RNA. EMBO J. (1995), 14(2), 368-76.
[^{xxvi}] Scott, W. G., Finch, J. T., Aaron, K. The crystal structure of an all RNA hammerhead ribozyme: A proposed mechanism for RNA catalytic cleavage. Cell, (1995), 81, 991-1002.
[^{xxvii}] McKay, Structure and function of the hammerhead ribozyme: an unfinished story. RNA, (1996), 2, 395-403.
[^{xxviii}] Long, D., Uhlenbeck, O., Hertel, K. Ligation with hammerhead ribozymes. U.S. Pat. No. 5,633,133.
[^{xxix}] Hertel, K. J., Herschlag, D., Uhlenbeck, O. A kinetic and thermodynamic framework for the hammerhead ribozyme reaction. Biochemistry, (1994) 33, 3374-3385. Beigelman, L., et al., Chemical modifications of hammerhead ribozymes. J. Biol. Chem., (1995) 270, 25702-25708.
[^{xxx}] Beigelman, L., et al., Chemical modifications of hammerhead ribozymes. J. Biol. Chem., (1995) 270, 25702-25708.
[^{xxxi}] Hampel, Arnold; Tritz, Richard; Hicks, Margaret; Cruz, Phillip. ‘Hairpin’ catalytic RNA model: evidence for helixes and sequence requirement for substrate RNA. Nucleic Acids Res. (1990), 18(2), 299-304.
[^{xxxii}] Chowrira, Bharat M.; Berzal-Herranz, Alfredo; Burke, John M.. Novel guanosine requirement for catalysis by the hairpin ribozyme. Nature (London) (1991), 354(6351), 320-2.
[^{xxxiii}] Berzal-Herranz, Alfredo; Joseph, Simpson: Chowrira, Bharat M.; Butcher, Samuel E.; Burke, John M.. Essential nucleotide sequences and secondary structure elements of the hairpin ribozyme. EMBO J. (1993), 12(6), 2567-73.
[^{xxxiv}] Joseph, Simpson; Berzal-Herranz, Alfredo; Chowrira, Bharat M.; Butcher, Samuel E.. Substrate selection rules for the hairpin ribozyme determined by in vitro selection, mutation, and analysis of mismatched substrates. Genes Dev. (1993), 7(1), 130-8.
[^{xxxv}] Berzal-Herranz, Alfredo; Joseph, Simpson; Burke, John M.. In vitro selection of active hairpin ribozymes by sequential RNA-catalyzed cleavage and ligation reactions. Genes Dev. (1992), 6(1), 129-34.
[^{xxxvi}] Hegg, Lisa A.; Fedor, Martha J.. Kinetics and Thermodynamics of Intermolecular Catalysis by Hairpin Ribozymes. Biochemistry (1995), 34(48), 15813-28.
[^{xxxvii}] Grasby, Jane A.; Mersmann, Karin; Singh, Mohinder; Gait, Michael J.. Purine Functional Groups in Essential Residues of the Hairpin Ribozyme Required for Catalytic Cleavage of RNA. Biochemistry (1995), 34(12), 4068-76.
[^{xxxviii}] Schmidt, Sabine; Beigelman, Leonid; Karpeisky, Alexander; Usman, Nassim; Sorensen, Ulrik S.; Gait, Michael J.. Base and sugar requirements for RNA cleavage of essential nucleoside residues in internal loop B of the hairpin ribozyme: implications for secondary structure. Nucleic Acids Res. (1996), 24(4), 573-81.
[^{xxix}] Perrotta, Anne T.; Been, Michael D.. Cleavage of oligoribonucleotides by a ribozyme derived from the hepatitis delta. virus RNA sequence. Biochemistry (1992), 31(1), 16-21.
[^{xl}] Perrotta, Anne T.; Been, Michael D.. A pseudoknot-like structure required for efficient self-cleavage of hepatitis delta virus RNA. Nature (London) (1991), 350(6317), 434-6.
[^{xli}] Puttaraju, M.; Perrotta, Anne T.; Been, Michael D.. A circular trans-acting hepatitis delta virus ribozyme. Nucleic Acids Res. (1993), 21(18), 4253-8.

[0181] TABLE II
0.2 μmol RNA Synthesis Cycle

| Reagents | Equivalents | Amounts (microL) | Wait time (sec) |
|---|---|---|---|
| Phosphoramidites | 15 | 31 | 465 |
| SET | 38.7 | 31 | 465 |
| Acetic anhydride | 655 | 124 | 5 |
| N-methyl-imidazole | 1245 | 124 | 5 |
| TCA | 700 | 732 | 10 |
| Iodine | 20.6 | 244 | 15 |

* Wait time does not include contact time during delivery.

[0182] TABLE III
Human telomerase reverse transcriptase (TERT) Hammerhead Ribozyme and Target Sequence

| nt. | | Seq ID | Substrate | Seq ID |
|---|---|---|---|---|
| Position | Ribozyme Sequence | Nos. | Sequence | Nos. |
| 13 | CGCAGCAG CUGAUGAG GCCGUUAGGC CGAA ACGCAGCG | 2780 | CGCUGCGU C CUGCUGCG | 1 |
| 68 | GCAGCGGG CUGAUGAG GCCGUUAGGC CGAA AGCGCGCG | 2781 | CGCGCGCU C CCCGCUGC | 2 |
| 90 | GCAGCAGG CUGAUGAG GCCGUUAGGC CGAA AGCGCACG | 2782 | CGUGCGCU C CCUGCUGC | 3 |
| 108 | CCUCGCGG CUGAUGAG GCCGUUAGGC CGAA AGUGGCUG | 2783 | CAGCCACU A CCGCGAGG | 4 |
| 135 | GCCGCACG CUGAUGAG GCCGUUAGGC CGAA ACGUGGCC | 2784 | GGCCACGU U CGUGCGGC | 5 |
| 136 | CGCCGCAC CUGAUGAG GCCGUUAGGC CGAA AACGUGGC | 2785 | GCCACGUU C GUGCGGCG | 6 |
| 194 | CGCGCGGA CUGAUGAG GCCGUUAGGC CGAA AGCCGCCG | 2786 | CGGCGGCU U UCCGCGCG | 7 |
| 195 | GCGCGCGG CUGAUGAG GCCGUUAGGC CGAA AAGCCGCC | 2787 | GGCGGCUU U CCGCGCGC | 8 |
| 196 | AGCGCGCG CUGAUGAG GCCGUUAGGC CGAA AAAGCCGC | 2788 | GCGGCUUU C CGCGCGCU | 9 |
| 264 | GGCGGAAG CUGAUGAG GCCGUUAGGC CGAA AGGGGGCG | 2789 | CGCCCCCU C CUUCCGCC | 10 |
| 267 | CCUGGCGG CUGAUGAG GCCGUUAGGC CGAA AGGAGGGG | 2790 | CCCCUCCU U CCGCCAGG | 11 |
| 268 | ACCUGGCG CUGAUGAG GCCGUUAGGC CGAA AAGGAGGG | 2791 | CCCUCCUU C CGCCAGGU | 12 |
| 279 | UCAGGCAG CUGAUGAG GCCGUUAGGC CGAA ACACCUGG | 2792 | CCAGGUGU C CUGCCUGA | 13 |
| 351 | CGAAGCCG CUGAUGAG GCCGUUAGGC CGAA AGGCCAGC | 2793 | GCUGGCCU U CGGCUUCG | 14 |
| 352 | GCGAAGCC CUGAUGAG GCCGUUAGGC CGAA AAGGCCAG | 2794 | CUGGCCUU C GGCUUCGC | 15 |
| 357 | GCAGCGCG CUGAUGAG GCCGUUAGGC CGAA AGCCGAAG | 2795 | CUUCGGCU U CGCGCUGC | 16 |
| 358 | AGCAGCGC CUGAUGAG GCCGUUAGGC CGAA AAGCCGAA | 2796 | UUCGGCUU C GCGCUGCU | 17 |
| 399 | UGGUGGUG CUGAUGAG GCCGUUAGGC CGAA AGGCCUCG | 2797 | CGAGGCCU U CACCACCA | 18 |
| 400 | CUGGUGGU CUGAUGAG GCCGUUAGGC CGAA AAGGCCUC | 2798 | GAGGCCUU C ACCACCAG | 19 |
| 420 | UGGGCAGG CUGAUGAG GCCGUUAGGC CGAA AGCUGCGC | 2799 | GCGCAGCU A CCUGCCCA | 20 |
| 505 | AGCAGGUG CUGAUGAG GCCGUUAGGC CGAA ACCAGCAC | 2800 | GUGCUGGU U CACCUGCU | 21 |
| 506 | CAGCAGGU CUGAUGAG GCCGUUAGGC CGAA AACCAGCA | 2801 | UGCUGGUU C ACCUGCUG | 22 |
| 529 | AGCACAAA CUGAUGAG GCCGUUAGGC CGAA AGCGCGCA | 2802 | UGCGCGCU C UUUGUGCU | 23 |
| 531 | CCAGCACA CUGAUGAG GCCGUUAGGC CGAA AGAGCGCG | 2803 | CGCGCUCU U UGUGCUGG | 24 |
| 532 | ACCAGCAC CUGAUGAG GCCGUUAGGC CGAA AAGAGCGC | 2804 | GCGCUCUU U GUGCUGGU | 25 |
| 545 | GCAGCUGG CUGAUGAG GCCGUUAGGC CGAA AGCCACCA | 2805 | UGGUGGCU C CCAGCUGC | 26 |
| 558 | ACACCUGG CUGAUGAG GCCGUUAGGC CGAA AGGCGCAG | 2806 | CUGCGCCU A CCAGGUGU | 27 |
| 582 | CGAGCUGG CUGAUGAG GCCGUUAGGC CGAA ACAGCGGC | 2807 | GCCGCUGU A CCAGCUCG | 28 |
| 589 | GCAGCGCC CUGAUGAG GCCGUUAGGC CGAA AGCUGGUA | 2808 | UACCAGCU C GGCGCUGC | 29 |
| 602 | CCGGGCCU CUGAUGAG GCCGUUAGGC CGAA AGUGGCAG | 2809 | CUGCCACU C AGGCCCGG | 30 |
| 626 | GGGUCCAC CUGAUGAG GCCGUUAGGC CGAA AGCGUGUG | 2810 | CACACGCU A GUGGACCC | 31 |
| 644 | GCAUCCCA CUGAUGAG GCCGUUAGGC CGAA ACGCCUUC | 2811 | GAAGGCGU C UGGGAUGC | 32 |
| 671 | CCUGACGC CUGAUGAG GCCGUUAGGC CGAA AUGGUUCC | 2812 | GGAACCAU A GCGUCAGG | 33 |
| 676 | GCCUCCCU CUGAUGAG GCCGUUAGGC CGAA ACGCUAUG | 2813 | CAUAGCGU C AGGGAGGC | 34 |
| 691 | CCCAGGGG CUGAUGAG GCCGUUAGGC CGAA ACCCCGGC | 2814 | GCCGGGGU C CCCCUGGG | 35 |
| 749 | CAACGGCA CUGAUGAG GCCGUUAGGC CGAA ACUUCGGC | 2815 | GCCGAAGU C UGCCGUUG | 36 |
| 756 | UCUUGGGC CUGAUGAG GCCGUUAGGC CGAA ACGGCAGA | 2816 | UCUGCCGU U GCCCAAGA | 37 |
| 808 | CCCUGCCC CUGAUGAG GCCGUUAGGC CGAA ACGGGCGU | 2817 | ACGCCCGU U GGGCAGGG | 38 |
| 819 | GGGCCCAG CUGAUGAG GCCGUUAGGC CGAA ACCCCUGC | 2818 | GCAGGGGU C CUGGGCCC | 39 |
| 863 | CACACAGA CUGAUGAG GCCGUUAGGC CGAA ACCACGGU | 2819 | ACCGUGGU U UCUGUGUG | 40 |
| 864 | CCACACAG CUGAUGAG GCCGUUAGGC CGAA AACCACGG | 2820 | CCGUGGUU U CUGUGUGG | 41 |
| 865 | ACCACACA CUGAUGAG GCCGUUAGGC CGAA AAACCACG | 2821 | CGUGGUUU C UGUGUGGU | 42 |
| 876 | UGGCAGGU CUGAUGAG GCCGUUAGGC CGAA ACACCACA | 2822 | UGUGGUGU C ACCUGCCA | 43 |
| 906 | CCUCCAAA CUGAUGAG GCCGUUAGGC CGAA AGGUGGCU | 2823 | AGCCACCU C UUUGGAGG | 44 |
| 908 | ACCCUCCA CUGAUGAG GCCGUUAGGC CGAA AGAGGUGG | 2824 | CCACCUCU U UGGAGGGU | 45 |
| 909 | CACCCUCC CUGAUGAG GCCGUUAGGC CGAA AAGAGGUG | 2825 | CACCUCUU U GGAGGGUG | 46 |
| 922 | GUGCCAGA CUGAUGAG GCCGUUAGGC CGAA AGCGCACC | 2826 | GGUGCGCU C UCUGGCAC | 47 |
| 924 | GCGUGCCA CUGAUGAG GCCGUUAGGC CGAA AGAGCGCA | 2827 | UGCGCUCU C UGGCACGC | 48 |
| 939 | AUGGGUGG CUGAUGAG GCCGUUAGGC CGAA AGUGGCGC | 2828 | GCGCCACU C CCACCCAU | 49 |
| 948 | GGCCCACG CUGAUGAG GCCGUUAGGC CGAA AUGGGUGG | 2829 | CCACCCAU C CGUGGGCC | 50 |
| 981 | GCGAUGUG CUGAUGAG GCCGUUAGGC CGAA AUGGGGGG | 2830 | CCCCCCAU C CACAUCGC | 51 |
| 987 | GUGGCCGC CUGAUGAG GCCGUUAGGC CGAA AUGUGGAU | 2831 | AUCCACAU C GCGGCCAC | 52 |
| 1001 | GUCCCAGG CUGAUGAG GCCGUUAGGC CGAA ACGUGGUG | 2832 | CACCACGU C CCUGGGAC | 53 |
| 1016 | CGGGGGAC CUGAUGAG GCCGUUAGGC CGAA AGGCGUGU | 2833 | ACACGCCU U GUCCCCCG | 54 |
| 1019 | CACCGGGG CUGAUGAG GCCGUUAGGC CGAA ACAAGGCG | 2834 | CGCCUUGU C CCCCGGUG | 55 |
| 1029 | UCUCGGCG CUGAUGAG GCCGUUAGGC CGAA ACACCGGG | 2835 | CCCGGUGU A CGCCGAGA | 56 |
| 1047 | AGUAGAGG CUGAUGAG GCCGUUAGGC CGAA AGUGCUUG | 2836 | CAAGCACU U CCUCUACU | 57 |
| 1048 | GAGUAGAG CUGAUGAG GCCGUUAGGC CGAA AAGUGCUU | 2837 | AAGCACUU C CUCUACUC | 58 |
| 1051 | GAGGAGUA CUGAUGAG GCCGUUAGGC CGAA AGGAAGUG | 2838 | CACUUCCU C UACUCCUC | 59 |
| 1053 | CUGAGGAG CUGAUGAG GCCGUUAGGC CGAA AGAGGAAG | 2839 | CUUCCUCU A CUCCUCAG | 60 |
| 1056 | CGCCUGAG CUGAUGAG GCCGUUAGGC CGAA AGUAGAGG | 2840 | CCUCUACU C CUCAGGCG | 61 |
| 1059 | UGUCGCCU CUGAUGAG GCCGUUAGGC CGAA AGGAGUAG | 2841 | CUACUCCU C AGGCGACA | 62 |
| 1086 | GUAGGAAG CUGAUGAG GCCGUUAGGC CGAA AGGGCCGC | 2842 | GCGGCCCU C CUUCCUAC | 63 |
| 1089 | UGAGUAGG CUGAUGAG GCCGUUAGGC CGAA AGGAGGGC | 2843 | GCCCUCCU U CCUACUCA | 64 |
| 1090 | CUGAGUAG CUGAUGAG GCCGUUAGGC CGAA AAGGAGGG | 2844 | CCCUCCUU C CUACUCAG | 65 |
| 1093 | GAGCUGAG CUGAUGAG GCCGUUAGGC CGAA AGGAAGGA | 2845 | UCCUUCCU A CUCAGCUC | 66 |
| 1096 | AGAGAGCU CUGAUGAG GCCGUUAGGC CGAA AGUAGGAA | 2846 | UUCCUACU C AGCUCUCU | 67 |
| 1101 | GCCUCAGA CUGAUGAG GCCGUUAGGC CGAA AGCUGAGU | 2847 | ACUCAGCU C UCUGAGGC | 68 |
| 1103 | GGGCCUCA CUGAUGAG GCCGUUAGGC CGAA AGAGCUGA | 2848 | UCAGCUCU C UGAGGCCC | 69 |
| 1127 | GAGCCUCC CUGAUGAG GCCGUUAGGC CGAA AGCGCCAG | 2849 | CUGGCGCU C GGAGGCUC | 70 |
| 1135 | GUCUCCAC CUGAUGAG GCCGUUAGGC CGAA AGCCUCCG | 2850 | CGGAGGCU C GUGGAGAC | 71 |
| 1147 | CCCAGAAA CUGAUGAG GCCGUUAGGC CGAA AUGGUCUC | 2851 | GAGACCAU C UUUCUGGG | 72 |
| 1149 | AACCCAGA CUGAUGAG GCCGUUAGGC CGAA AGAUGGUC | 2852 | GACCAUCU U UCUGGGUU | 73 |
| 1150 | GAACCCAG CUGAUGAG GCCGUUAGGC CGAA AAGAUGGU | 2853 | ACCAUCUU U CUGGGUUC | 74 |
| 1151 | GGAACCCA CUGAUGAG GCCGUUAGGC CGAA AAAGAUGG | 2854 | CCAUCUUU C UGGGUUCC | 75 |
| 1157 | GGGCCUGG CUGAUGAG GCCGUUAGGC CGAA ACCCAGAA | 2855 | UUCUGGGU U CCAGGCCC | 76 |
| 1158 | AGGGCCUG CUGAUGAG GCCGUUAGGC CGAA AACCCAGA | 2856 | UCUGGGUU C CAGGCCCU | 77 |
| 1181 | CCUGCGGG CUGAUGAG GCCGUUAGGC CGAA AGUCCCUG | 2857 | CAGGGACU C CCCGCAGG | 78 |
| 1191 | GGCGGGGC CUGAUGAG GCCGUUAGGC CGAA ACCUGCGG | 2858 | CCGCAGGU U GCCCCGCC | 79 |
| 1212 | UUUGCCAG CUGAUGAG GCCGUUAGGC CGAA AGCGCUGG | 2859 | CCAGCGCU A CUGGCAAA | 80 |
| 1233 | GCUCCAGA CUGAUGAG GCCGUUAGGC CGAA ACAGGGGC | 2860 | GCCCCUGU U UCUGGAGC | 81 |
| 1234 | AGCUCCAG CUGAUGAG GCCGUUAGGC CGAA AACAGGGG | 2861 | CCCCUGUU U CUGGAGCU | 82 |
| 1235 | CAGCUCCA CUGAUGAG GCCGUUAGGC CGAA AAACAGGG | 2862 | CCCUGUUU C UGGAGCUG | 83 |
| 1246 | UGGUUCCC CUGAUGAG GCCGUUAGGC CGAA AGCAGCUC | 2863 | GAGCUGCU U GGGAACCA | 84 |
| 1269 | GCACCCCG CUGAUGAG GCCGUUAGGC CGAA AGGGGCAC | 2864 | GUGCCCCU A CGGGGUGC | 85 |
| 1279 | GUCUUGAG CUGAUGAG GCCGUUAGGC CGAA AGCACCCC | 2865 | GGGGUGCU C CUCAAGAC | 86 |
| 1282 | UGCGUCUU CUGAUGAG GCCGUUAGGC CGAA AGGAGCAC | 2866 | GUGCUCCU C AAGACGCA | 87 |
| 1312 | GCUGGGGU CUGAUGAG GCCGUUAGGC CGAA ACCGCAGC | 2867 | GCUGCGGU C ACCCCAGC | 88 |
| 1330 | CGGGCACA CUGAUGAG GCCGUUAGGC CGAA ACACCGGC | 2868 | GCCGGUGU C UGUGCCCG | 89 |
| 1356 | CCGCCACA CUGAUGAG GCCGUUAGGC CGAA AGCCCUGG | 2869 | CCAGGGCU C UGUGGCGG | 90 |
| 1394 | CACCAGGC CUGAUGAG GCCGUUAGGC CGAA ACGGGGGU | 2870 | ACCCCCGU C GCCUGGUG | 91 |
| 1411 | UGCUGGCG CUGAUGAG GCCGUUAGGC CGAA AGCAGCUG | 2871 | CAGCUGCU C CGCCAGCA | 92 |
| 1440 | CGAAGCCG CUGAUGAG GCCGUUAGGC CGAA ACACCUGC | 2872 | GCAGGUGU A CGGCUUCG | 93 |
| 1446 | CCCGCACG CUGAUGAG GCCGUUAGGC CGAA AGCCGUAC | 2873 | GUACGGCU U CGUGCGGG | 94 |
| 1447 | GCCCGCAC CUGAUGAG GCCGUUAGGC CGAA AAGCCGUA | 2874 | UACGGCUU C GUGCGGGC | 95 |
| 1486 | GAGCCCCA CUGAUGAG GCCGUUAGGC CGAA AGGCCUGG | 2875 | CCAGGCCU C UGGGGCUC | 96 |
| 1494 | UGUGCCUG CUGAUGAG GCCGUUAGGC CGAA AGCCCCAG | 2876 | CUGGGGCU C CAGGCACA | 97 |
| 1515 | UCCUGAGG CUGAUGAG GCCGUUAGGC CGAA AGCGGCGU | 2877 | ACGCCGCU U CCUCAGGA | 98 |
| 1516 | UUCCUGAG CUGAUGAG GCCGUUAGGC CGAA AAGCGGCG | 2878 | CGCCGCUU C CUCAGGAA | 99 |
| 1519 | GUGUUCCU CUGAUGAG GCCGUUAGGC CGAA AGGAAGCG | 2879 | CGCUUCCU C AGGAACAC | 100 |
| 1536 | GGGAGAUG CUGAUGAG GCCGUUAGGC CGAA ACUUCUUG | 2880 | CAAGAAGU U CAUCUCCC | 101 |
| 1537 | AGGGAGAU CUGAUGAG GCCGUUAGGC CGAA AACUUCUU | 2881 | AAGAAGUU C AUCUCCCU | 102 |
| 1540 | CCCAGGGA CUGAUGAG GCCGUUAGGC CGAA AUGAACUU | 2882 | AAGUUCAU C UCCCUGGG | 103 |
| 1542 | UCCCCAGG CUGAUGAG GCCGUUAGGC CGAA AGAUGAAC | 2883 | GUUCAUCU C CCUGGGGA | 104 |
| 1564 | UGCAGCGA CUGAUGAG GCCGUUAGGC CGAA AGCUUGGC | 2884 | GCCAAGCU C UCGCUGCA | 105 |
| 1566 | CCUGCAGC CUGAUGAG GCCGUUAGGC CGAA AGAGCUUG | 2885 | CAAGCUCU C GCUGCAGG | 106 |
| 1610 | GCGCAGCC CUGAUGAG GCCGUUAGGC CGAA AGCGCAGU | 2886 | ACUGCGCU U GGCUGCGC | 107 |
| 1633 | ACACAGCC CUGAUGAG GCCGUUAGGC CGAA ACCCCUGG | 2887 | CCAGGGGU U GGCUGUGU | 108 |
| 1642 | GCGGCCGG CUGAUGAG GCCGUUAGGC CGAA ACACAGCC | 2888 | GGCUGUGU U CCGGCCGC | 109 |
| 1643 | UGCGGCCG CUGAUGAG GCCGUUAGGC CGAA AACACAGC | 2889 | GCUGUGUU C CGGCCGCA | 110 |
| 1661 | GUCACGCA CUGAUGAG GCCGUUAGGC CGAA ACGGUGCU | 2890 | AGCACCGU C UGCGUGAG | 111 |
| 1675 | UUGGCCAG CUGAUGAG GCCGUUAGGC CGAA AUCUCCUC | 2891 | GAGGAGAU C CUGGCCAA | 112 |
| 1686 | AGUGCAGG CUGAUGAG GCCGUUAGGC CGAA ACUUGGCC | 2892 | GGCCAAGU U CCUGCACU | 113 |
| 1687 | CAGUGCAG CUGAUGAG GCCGUUAGGC CGAA AACUUGGC | 2893 | GCCAAGUU C CUGCACUG | 114 |
| 1710 | CGACGACG CUGAUGAG GCCGUUAGGC CGAA ACACACUC | 2894 | GAGUGUGU A CGUCGUCG | 115 |
| 1714 | AGCUCGAC CUGAUGAG GCCGUUAGGC CGAA ACGUACAC | 2895 | GUGUACGU C GUCGAGCU | 116 |
| 1717 | AGCAGCUC CUGAUGAG GCCGUUAGGC CGAA ACGACGUA | 2896 | UACGUCGU C GAGCUGCU | 117 |
| 1726 | AAAGACCU CUGAUGAG GCCGUUAGGC CGAA AGCAGCUC | 2897 | GAGCUGCU C AGGUCUUU | 118 |
| 1731 | AAAAGAAA CUGAUGAG GCCGUUAGGC CGAA ACCUGAGC | 2898 | GCUCAGGU C UUUCUUUU | 119 |
| 1733 | AUAAAAGA CUGAUGAG GCCGUUAGGC CGAA AGACCUGA | 2899 | UCAGGUCU U UCUUUUAU | 120 |
| 1734 | CAUAAAAG CUGAUGAG GCCGUUAGGC CGAA AAGACCUG | 2900 | CAGGUCUU U CUUUUAUG | 121 |
| 1735 | ACAUAAAA CUGAUGAG GCCGUUAGGC CGAA AAAGACCU | 2901 | AGGUCUUU C UUUUAUGU | 122 |
| 1737 | UGACAUAA CUGAUGAG GCCGUUAGGC CGAA AGAAAGAC | 2902 | GUCUUUCU U UUAUGUCA | 123 |
| 1738 | GUGACAUA CUGAUGAG GCCGUUAGGC CGAA AAGAAAGA | 2903 | UCUUUCUU U UAUGUCAC | 124 |
| 1739 | CGUGACAU CUGAUGAG GCCGUUAGGC CGAA AAAGAAAG | 2904 | CUUUCUUU U AUGUCACG | 125 |
| 1740 | CCGUGACA CUGAUGAG GCCGUUAGGC CGAA AAAAGAAA | 2905 | UUUCUUUU A UGUCACGG | 126 |
| 1744 | GUCUCCGU CUGAUGAG GCCGUUAGGC CGAA ACAUAAAA | 2906 | UUUUAUGU C ACGGAGAC | 127 |
| 1758 | UCUUUUGA CUGAUGAG GCCGUUAGGC CGAA ACGUGGUC | 2907 | GACCACGU U UCAAAAGA | 128 |
| 1759 | UUCUUUUG CUGAUGAG GCCGUUAGGC CGAA AACGUGGU | 2908 | ACCACGUU U CAAAAGAA | 129 |
| 1760 | GUUCUUUU CUGAUGAG GCCGUUAGGC CGAA AAACGUGG | 2909 | CCACGUUU C AAAAGAAC | 130 |
| 1774 | UAGAAAAA CUGAUGAG GCCGUUAGGC CGAA AGCCUGUU | 2910 | AACAGGCU C UUUUUCUA | 131 |
| 1776 | GGUAGAAA CUGAUGAG GCCGUUAGGC CGAA AGAGCCUG | 2911 | CAGGCUCU U UUUCUACC | 122 |
| 1777 | CGGUAGAA CUGAUGAG GCCGUUAGGC CGAA AAGAGCCU | 2912 | AGGCUCUU U UUCUACCG | 133 |
| 1778 | CCGGUAGA CUGAUGAG GCCGUUAGGC CGAA AAAGAGCC | 2913 | GGCUCUUU U UCUACCGG | 134 |
| 1779 | UCCGGUAG CUGAUGAG GCCGUUAGGC CGAA AAAAGAGC | 2914 | GCUCUUUU U CUACCGGA | 135 |
| 1780 | UUCCGGUA CUGAUGAG GCCGUUAGGC CGAA AAAAAGAG | 2915 | CUCUUUUU C UACCGGAA | 136 |
| 1782 | UCUUCCGG CUGAUGAG GCCGUUAGGC CGAA AGAAAAAG | 2916 | CUUUUUCU A CCGGAAGA | 137 |
| 1795 | UUGCUCCA CUGAUGAG GCCGUUAGGC CGAA ACACUCUU | 2917 | AAGAGUGU C UGGAGCAA | 138 |
| 1806 | UGCUUUGC CUGAUGAG GCCGUUAGGC CGAA ACUUGCUC | 2918 | GAGCAAGU U GCAAAGCA | 139 |
| 1816 | CUGAUUCC CUGAUGAG GCCGUUAGGC CGAA AUGCUUUG | 2919 | CAAAGCAU U GGAAUCAG | 140 |
| 1822 | UGCUGUCU CUGAUGAG GCCGUUAGGC CGAA AUUCCAAU | 2920 | AUUGGAAU C AGACAGCA | 141 |
| 1833 | CCCUCUUC CUGAUGAG GCCGUUAGGC CGAA AGUGCUGU | 2921 | ACAGCACU U GAAGAGGG | 142 |
| 1860 | CUGCUUCC CUGAUGAG GCCGUUAGGC CGAA ACAGCUCC | 2922 | GGAGCUGU C GGAAGCAG | 143 |
| 1873 | UGCUGCCU CUGAUGAG GCCGUUAGGC CGAA ACCUCUGC | 2923 | GCAGAGGU C AGGCAGCA | 144 |
| 1883 | GGCUUCCC CUGAUGAG GCCGUUAGGC CGAA AUGCUGCC | 2924 | GGCAGCAU C GGGAAGCC | 145 |
| 1911 | GGAGUCUG CUGAUGAG GCCGUUAGGC CGAA ACGUCAGC | 2925 | GCUGACGU C CAGACUCC | 146 |
| 1918 | AUGAAGCG CUGAUGAG GCCGUUAGGC CGAA AGUCUGGA | 2926 | UCCAGACU C CGCUUCAU | 147 |
| 1923 | UGGGGAUG CUGAUGAG GCCGUUAGGC CGAA AGCGGAGU | 2927 | ACUCCGCU U CAUCCCCA | 148 |
| 1924 | UUGGGGAU CUGAUGAG GCCGUUAGGC CGAA AAGCGGAG | 2928 | CUCCGCUU C AUCCCCAA | 149 |
| 1927 | GGCUUGGG CUGAUGAG GCCGUUAGGC CGAA AUGAAGCG | 2929 | CGCUUCAU C CCCAAGCC | 150 |
| 1954 | AUGUUCAC CUGAUGAG GCCGUUAGGC CGAA AUCGGCCG | 2930 | CGGCCGAU U GUGAACAU | 151 |
| 1968 | CCACGACG CUGAUGAG GCCGUUAGGC CGAA AGUCCAUG | 2931 | CAUGGACU A CGUCGUGG | 152 |
| 1972 | GCUCCCAC CUGAUGAG GCCGUUAGGC CGAA ACGUAGUC | 2932 | GACUACGU C GUGGGAGC | 153 |
| 1989 | CUCUGCGG CUGAUGAG GCCGUUAGGC CGAA ACGUUCUG | 2933 | CAGAACGU U CCGCAGAG | 154 |
| 1990 | UCUCUGCG CUGAUGAG GCCGUUAGGC CGAA AACGUUCU | 2934 | AGAACGUU C CGCAGAGA | 155 |
| 2015 | CGAGGUGA CUGAUGAG GCCGUUAGGC CGAA ACGCUCGG | 2935 | CCGAGCGU C UCACCUCG | 156 |
| 2017 | CUCGAGGU CUGAUGAG GCCGUUAGGC CGAA AGACGCUC | 2936 | GAGCGUCU C ACCUCGAG | 157 |
| 2022 | UCACCCUC CUGAUGAG GCCGUUAGGC CGAA AGGUGAGA | 2937 | UCUCACCU C GAGGGUGA | 158 |
| 2040 | GCACGCUG CUGAUGAG GCCGUUAGGC CGAA ACAGUGCC | 2938 | GGCACUGU U CAGCGUGC | 159 |
| 2041 | AGCACGCU CUGAUGAG GCCGUUAGGC CGAA AACAGUGC | 2939 | GCACUGUU C AGCGUGCU | 160 |
| 2050 | UCGUAGUU CUGAUGAG GCCGUUAGGC CGAA AGCACGCU | 2940 | AGCGUGCU C AACUACGA | 161 |
| 2055 | CCCGCUCG CUGAUGAG GCCGUUAGGC CGAA AGUUGAGC | 2941 | GCUCAACU A CGAGCGGG | 162 |
| 2080 | GCGCCCAG CUGAUGAG GCCGUUAGGC CGAA AGGCCGGG | 2942 | CCCGGCCU C CUGGGCGC | 163 |
| 2091 | CCAGCACA CUGAUGAG GCCGUUAGGC CGAA AGGCGCCC | 2943 | GGGCGCCU C UGUGCUGG | 164 |
| 2111 | CCUGUGGA CUGAUGAG GCCGUUAGGC CGAA AUCGUCCA | 2944 | UGGACGAU A UCCACAGG | 165 |
| 2113 | GCCCUGUG CUGAUGAG GCCGUUAGGC CGAA AUAUCGUC | 2945 | GACGAUAU C CACAGGGC | 166 |
| 2133 | GCAGCACG CUGAUGAG GCCGUUAGGC CGAA AGGUGCGC | 2946 | GCGCACCU U CGUGCUGC | 167 |
| 2134 | CGCAGCAC CUGAUGAG GCCGUUAGGC CGAA AAGGUGCG | 2947 | CGCACCUU C GUGCUGCG | 168 |
| 2175 | UGACAAAG CUGAUGAG GCCGUUAGGC CGAA ACAGCUCA | 2948 | UGAGCUGU A CUUUGUCA | 169 |
| 2178 | CCUUGACA CUGAUGAG GCCGUUAGGC CGAA AGUACAGC | 2949 | GCUGUACU U UGUCAAGG | 170 |
| 2179 | ACCUUGAC CUGAUGAG GCCGUUAGGC CGAA AAGUACAG | 2950 | CUGUACUU U GUCAAGGU | 171 |
| 2182 | UCCACCUU CUGAUGAG GCCGUUAGGC CGAA ACAAAGUA | 2951 | UACUUUGU C AAGGUGGA | 172 |
| 2205 | UGGUGUCG CUGAUGAG GCCGUUAGGC CGAA ACGCGCCC | 2952 | GGGCGCGU A CGACACCA | 173 |
| 2215 | UCCUGGGG CUGAUGAG GCCGUUAGGC CGAA AUGGUGUC | 2953 | GACACCAU C CCCCAGGA | 174 |
| 2230 | ACCUCCGU CUGAUGAG GCCGUUAGGC CGAA AGCCUGUC | 2954 | GACAGGCU C ACGGAGGU | 175 |
| 2239 | CUGGCGAU CUGAUGAG GCCGUUAGGC CGAA ACCUCCGU | 2955 | ACGGAGGU C AUCGCCAG | 176 |
| 2242 | AUGCUGGC CUGAUGAG GCCGUUAGGC CGAA AUGACCUC | 2956 | GAGGUCAU C GCCAGCAU | 177 |
| 2251 | GGUUUGAU CUGAUGAG GCCGUUAGGC CGAA AUGCUGGC | 2957 | GCCAGCAU C AUCAAACC | 178 |
| 2254 | UGGGGUUU CUGAUGAG GCCGUUAGGC CGAA AUGAUGCU | 2958 | AGCAUCAU C AAACCCCA | 179 |
| 2271 | GCACGCAG CUGAUGAG GCCGUUAGGC CGAA ACGUGUUC | 2959 | GAACACGU A CUGCGUGC | 180 |
| 2282 | GGCAUACC CUGAUGAG GCCGUUAGGC CGAA ACGCACGC | 2960 | GCGUGCGU C GGUAUGCC | 181 |
| 2286 | CCACGGCA CUGAUGAG GCCGUUAGGC CGAA ACCGACGC | 2961 | GCGUCGGU A UGCCGUGG | 182 |
| 2296 | GCCUUCUG CUGAUGAG GCCGUUAGGC CGAA ACCACGGC | 2962 | GCCGUGGU C CAGAAGGC | 183 |
| 2320 | GCCUUGCG CUGAUGAG GCCGUUAGGC CGAA ACGUGCCC | 2963 | GGGCACGU C CGCAAGGC | 184 |
| 2331 | GGCUCUUG CUGAUGAG GCCGUUAGGC CGAA AGGCCUUG | 2964 | CAAGGCCU U CAAGAGCC | 185 |
| 2332 | UGGCUCUU CUGAUGAG GCCGUUAGGC CGAA AAGGCCUU | 2965 | AAGGCCUU C AAGAGCCA | 186 |
| 2344 | AAGGUAGA CUGAUGAG GCCGUUAGGC CGAA ACGUGGCU | 2966 | AGCCACGU C UCUACCUU | 187 |
| 2346 | UCAAGGUA CUGAUGAG GCCGUUAGGC CGAA AGACGUGG | 2967 | CCACGUCU C UACCUUGA | 188 |
| 2348 | UGUCAAGG CUGAUGAG GCCGUUAGGC CGAA AGAGACGU | 2968 | ACGUCUCU A CCUUGACA | 189 |
| 2352 | GGUCUGUC CUGAUGAG GCCGUUAGGC CGAA AGGUAGAG | 2969 | CUCUACCU U GACAGACC | 190 |
| 2362 | UACGGCUG CUGAUGAG GCCGUUAGGC CGAA AGGUCUGU | 2970 | ACAGACCU C CAGCCGUA | 191 |
| 2370 | GUCGCAUG CUGAUGAG GCCGUUAGGC CGAA ACGGCUGG | 2971 | CCAGCCGU A CAUGCGAC | 192 |
| 2382 | GAGCCACG CUGAUGAG GCCGUUAGGC CGAA ACUGUCGC | 2972 | GCGACAGU U CGUGGCUC | 193 |
| 2383 | UGAGCCAC CUGAUGAG GCCGUUAGGC CGAA AACUGUCG | 2973 | CGACAGUU C GUGGCUCA | 194 |
| 2390 | CUGCAGGU CUGAUGAG GCCGUUAGGC CGAA AGCCACGA | 2974 | UCGUGGCU C ACCUGCAG | 195 |
| 2425 | UCGAUGAC CUGAUGAG GCCGUUAGGC CGAA ACGGCAUC | 2975 | GAUGCCGU C GUCAUCGA | 196 |
| 2428 | UGCUCGAU CUGAUGAG GCCGUUAGGC CGAA ACGACGGC | 2976 | GCCGUCGU C AUCGAGCA | 197 |
| 2431 | CUCUGCUC CUGAUGAG GCCGUUAGGC CGAA AUGACGAC | 2977 | GUCGUCAU C GAGCAGAG | 198 |
| 2442 | UCAGGGAG CUGAUGAG GCCGUUAGGC CGAA AGCUCUGC | 2978 | GCAGAGCU C CUCCCUGA | 199 |
| 2445 | CAUUCAGG CUGAUGAG GCCGUUAGGC CGAA AGGAGCUC | 2979 | GAGCUCCU C CCUGAAUG | 200 |
| 2470 | ACGUCGAA CUGAUGAG GCCGUUAGGC CGAA AGGCCACU | 2980 | AGUGGCCU C UUCGACGU | 201 |
| 2472 | AGACGUCG CUGAUGAG GCCGUUAGGC CGAA AGAGGCCA | 2981 | UGGCCUCU U CGACGUCU | 202 |
| 2473 | AAGACGUC CUGAUGAG GCCGUUAGGC CGAA AAGAGGCC | 2982 | GGCCUCUU C GACGUCUU | 203 |
| 2479 | CGUAGGAA CUGAUGAG GCCGUUAGGC CGAA ACGUCGAA | 2983 | UUCGACGU C UUCCUACG | 204 |
| 2481 | AGCGUAGG CUGAUGAG GCCGUUAGGC CGAA AGACGUCG | 2984 | CGACGUCU U CCUACGCU | 205 |
| 2482 | AAGCGUAG CUGAUGAG GCCGUUAGGC CGAA AAGACGUC | 2985 | GACGUCUU C CUACGCUU | 206 |
| 2485 | AUGAAGCG CUGAUGAG GCCGUUAGGC CGAA AGGAAGAC | 2986 | GUCUUCCU A CGCUUCAU | 207 |
| 2490 | GGCACAUG CUGAUGAG GCCGUUAGGC CGAA AGCGUAGG | 2987 | CCUACGCU U CAUGUGCC | 208 |
| 2491 | UGGCACAU CUGAUGAG GCCGUUAGGC CGAA AAGCGUAG | 2988 | CUACGCUU C AUGUGCCA | 209 |
| 2515 | UUGCCCCU CUGAUGAG GCCGUUAGGC CGAA AUGCGCAC | 2989 | GUGCGCAU C AGGGGCAA | 210 |
| 2526 | GGACGUAG CUGAUGAG GCCGUUAGGC CGAA ACUUGCCC | 2990 | GGGCAAGU C CUACGUCC | 211 |
| 2529 | ACUGGACG CUGAUGAG GCCGUUAGGC CGAA AGGACUUG | 2991 | CAAGUCCU A CGUCCAGU | 212 |
| 2533 | UGGCACUG CUGAUGAG GCCGUUAGGC CGAA ACGUAGGA | 2992 | UCCUACGU C CAGUGCCA | 213 |
| 2548 | CCCUGCGG CUGAUGAG GCCGUUAGGC CGAA AUCCCCUG | 2993 | CAGGGGAU C CCGCAGGG | 214 |
| 2559 | AGAGGAUG CUGAUGAG GCCGUUAGGC CGAA AGCCCUGC | 2994 | GCAGGGCU C CAUCCUCU | 215 |
| 2563 | GUGGAGAG CUGAUGAG GCCGUUAGGC CGAA AUGGAGCC | 2995 | GGCUCCAU C CUCUCCAC | 216 |
| 2566 | AGCGUGGA CUGAUGAG GCCGUUAGGC CGAA AGGAUGGA | 2996 | UCCAUCCU C UCCACGCU | 217 |
| 2568 | GCAGCGUG CUGAUGAG GCCGUUAGGC CGAA AGAGGAUG | 2997 | CAUCCUCU C CACGCUGC | 218 |
| 2578 | AGGCUGCA CUGAUGAG GCCGUUAGGC CGAA AGCAGCGU | 2998 | ACGCUGCU C UGCAGCCU | 219 |
| 2592 | UGUCGCCG CUGAUGAG GCCGUUAGGC CGAA AGCACAGG | 2999 | CCUGUGCU A CGGCGACA | 220 |
| 2616 | UCCCCGCA CUGAUGAG GCCGUUAGGC CGAA ACAGCUUG | 3000 | CAAGCUGU U UGCGGGGA | 221 |
| 2617 | AUCCCCGC CUGAUGAG GCCGUUAGGC CGAA AACAGCUU | 3001 | AAGCUGUU U GCGGGGAU | 222 |
| 2626 | UCCCGCCG CUGAUGAG GCCGUUAGGC CGAA AUCCCCGC | 3002 | GCGGGGAU U CGGCGGGA | 223 |
| 2627 | GUCCCGCC CUGAUGAG GCCGUUAGGC CGAA AAUCCCCG | 3003 | CGGGGAUU C GGCGGGAC | 224 |
| 2644 | AAACGCAG CUGAUGAG GCCGUUAGGC CGAA AGCAGCCC | 3004 | GGGCUGCU C CUGCGUUU | 225 |
| 2651 | AUCCACCA CUGAUGAG GCCGUUAGGC CGAA ACGCAGGA | 3005 | UCCUGCGU U UGGUGGAU | 226 |
| 2652 | CAUCCACC CUGAUGAG GCCGUUAGGC CGAA AACGCAGG | 3006 | CCUGCGUU U GGUGGAUG | 227 |
| 2663 | CAACAAGA CUGAUGAG GCCGUUAGGC CGAA AUCAUCCA | 3007 | UGGAUGAU U UCUUGUUG | 228 |
| 2664 | CCAACAAG CUGAUGAG GCCGUUAGGC CGAA AAUCAUCC | 3008 | GGAUGAUU U CUUGUUGG | 229 |
| 2665 | ACCAACAA CUGAUGAG GCCGUUAGGC CGAA AAAUCAUC | 3009 | GAUGAUUU C UUGUUGGU | 230 |
| 2667 | UCACCAAC CUGAUGAG GCCGUUAGGC CGAA AGAAAUCA | 3010 | UGAUUUCU U GUUGGUGA | 231 |
| 2670 | GUGUCACC CUGAUGAG GCCGUUAGGC CGAA ACAAGAAA | 3011 | UUUCUUGU U GGUGACAC | 232 |
| 2681 | GGUGAGGU CUGAUGAG GCCGUUAGGC CGAA AGGUGUCA | 3012 | UGACACCU C ACCUCACC | 233 |
| 2686 | GCGUGGGU CUGAUGAG GCCGUUAGGC CGAA AGGUGAGG | 3013 | CCUCACCU C ACCCACGC | 234 |
| 2703 | UCCUGAGG CUGAUGAG GCCGUUAGGC CGAA AGGUUUUC | 3014 | GAAAACCU U CCUCAGGA | 235 |
| 2704 | GUCCUGAG CUGAUGAG GCCGUUAGGC CGAA AAGGUUUU | 3015 | AAAACCUU C CUCAGGAC | 236 |
| 2707 | AGGGUCCU CUGAUGAG GCCGUUAGGC CGAA AGGAAGGU | 3016 | ACCUUCCU C AGGACCCU | 237 |
| 2719 | ACACCUCG CUGAUGAG GCCGUUAGGC CGAA ACCAGGGU | 3017 | ACCCUGGU C CGAGGUGU | 238 |
| 2728 | UACUCAGG CUGAUGAG GCCGUUAGGC CGAA ACACCUCG | 3018 | CGAGGUGU C CCUGAGUA | 239 |
| 2736 | CGCAGCCA CUGAUGAG GCCGUUAGGC CGAA ACUCAGGG | 3019 | CCCUGAGU A UGGCUGCG | 240 |
| 2754 | UCUUCCGC CUGAUGAG GCCGUUAGGC CGAA AGUUCACC | 3020 | GGUGAACU U GCGGAAGA | 241 |
| 2775 | CUACAGGG CUGAUGAG GCCGUUAGGC CGAA AGUUCACC | 3021 | GGUGAACU U CCCUGUAG | 242 |
| 2776 | UCUACAGG CUGAUGAG GCCGUUAGGC CGAA AAGUUCAC | 3022 | GUGAACUU C CCUGUAGA | 243 |
| 2782 | UCGUCUUC CUGAUGAG GCCGUUAGGC CGAA ACAGGGAA | 3023 | UUCCCUGU A GAAGACGA | 244 |
| 2810 | CUGAACAA CUGAUGAG GCCGUUAGGC CGAA AGCCGUGC | 3024 | GCACGGCU U UUGUUCAG | 245 |
| 2811 | UCUGAACA CUGAUGAG GCCGUUAGGC CGAA AAGCCGUG | 3025 | CACGGCUU U UGUUCAGA | 246 |
| 2812 | AUCUGAAC CUGAUGAG GCCGUUAGGC CGAA AAAGCCGU | 3026 | ACGGCUUU U GUUCAGAU | 247 |
| 2815 | GGCAUCUG CUGAUGAG GCCGUUAGGC CGAA ACAAAAGC | 3027 | GCUUUUGU U CAGAUGCC | 248 |
| 2816 | CGGCAUCU CUGAUGAG GCCGUUAGGC CGAA AACAAAAG | 3028 | CUUUUGUU C AGAUGCCG | 249 |
| 2836 | CAGGGGAA CUGAUGAG GCCGUUAGGC CGAA AGGCCGUG | 3029 | CACGGCCU A UUCCCCUG | 250 |
| 2838 | ACCAGGGG CUGAUGAG GCCGUUAGGC CGAA AUAGGCCG | 3030 | CGGCCUAU U CCCCUGGU | 251 |
| 2839 | CACCAGGG CUGAUGAG GCCGUUAGGC CGAA AAUAGGCC | 3031 | GGCCUAUU C CCCUGGUG | 252 |
| 2864 | GGUCCGGG CUGAUGAG GCCGUUAGGC CGAA AUCCAGCA | 3032 | UGCUGGAU A CCCGGACC | 253 |
| 2892 | AGCUGGAG CUGAUGAG GCCGUUAGGC CGAA AGUCGCUC | 3033 | GAGCGACU A CUCCAGCU | 254 |
| 2895 | CAUAGCUG CUGAUGAG GCCGUUAGGC CGAA AGUAGUCG | 3034 | CGACUACU C CAGCUAUG | 255 |
| 2901 | UCCGGGCA CUGAUGAG GCCGUUAGGC CGAA AGCUGGAG | 3035 | CUCCAGCU A UGCCCGGA | 256 |
| 2913 | CUCUGAUG CUGAUGAG GCCGUUAGGC CGAA AGGUCCGG | 3036 | CCGGACCU C CAUCAGAG | 257 |
| 2917 | CUGGCUCU CUGAUGAG GCCGUUAGGC CGAA AUGGAGGU | 3037 | ACCUCCAU C AGAGCCAG | 258 |
| 2927 | GAAGGUGA CUGAUGAG GCCGUUAGGC CGAA ACUGGCUC | 3038 | GAGCCAGU C UCACCUUC | 259 |
| 2929 | UUGAAGGU CUGAUGAG GCCGUUAGGC CGAA AGACUGGC | 3039 | GCCAGUCU C ACCUUCAA | 260 |
| 2934 | CGCGGUUG CUGAUGAG GCCGUUAGGC CGAA AGGUGAGA | 3040 | UCUCACCU U CAACCGCG | 261 |
| 2935 | CCGCGGUU CUGAUGAG GCCGUUAGGC CGAA AAGGUGAG | 3041 | CUCACCUU C AACCGCGG | 262 |
| 2946 | CAGCCUUG CUGAUGAG GCCGUUAGGC CGAA AGCCGCGG | 3042 | CCGCGGCU U CAAGGCUG | 263 |
| 2947 | CCAGCCUU CUGAUGAG GCCGUUAGGC CGAA AAGCCGCG | 3043 | CGCGGCUU C AAGGCUGG | 264 |
| 2969 | GAGUUUGC CUGAUGAG GCCGUUAGGC CGAA ACGCAUGU | 3044 | ACAUGCGU C GCAAACUC | 265 |
| 2977 | ACCCCAAA CUGAUGAG GCCGUUAGGC CGAA AGUUUGCG | 3045 | CGCAAACU C UUUGGGGU | 266 |
| 2979 | AGACCCCA CUGAUGAG GCCGUUAGGC CGAA AGAGUUUG | 3046 | CAAACUCU U UGGGGUCU | 267 |
| 2980 | AAGACCCC CUGAUGAG GCCGUUAGGC CGAA AAGAGUUU | 3047 | AAACUCUU U GGGGUCUU | 268 |
| 2986 | AGCCGCAA CUGAUGAG GCCGUUAGGC CGAA ACCCCAAA | 3048 | UUUGGGGU C UUGCGGCU | 269 |
| 2988 | UCAGCCGC CUGAUGAG GCCGUUAGGC CGAA AGACCCCA | 3049 | UGGGGUCU U GCGGCUGA | 270 |
| 3002 | CAGGCUGU CUGAUGAG GCCGUUAGGC CGAA ACACUUCA | 3050 | UGAAGUGU C ACAGCCUG | 271 |
| 3012 | AAUCCAGA CUGAUGAG GCCGUUAGGC CGAA ACAGGCUG | 3051 | CAGCCUGU U UCUGGAUU | 272 |
| 3013 | AAAUCCAG CUGAUGAG GCCGUUAGGC CGAA AACAGGCU | 3052 | AGCCUGUU U CUGGAUUU | 273 |
| 3014 | CAAAUCCA CUGAUGAG GCCGUUAGGC CGAA AAACAGGC | 3053 | GCCUGUUU C UGGAUUUG | 274 |
| 3020 | CACCUGCA CUGAUGAG GCCGUUAGGC CGAA AUCCAGAA | 3054 | UUCUGGAU U UGCAGGUG | 275 |
| 3021 | UCACCUGC CUGAUGAG GCCGUUAGGC CGAA AAUCCAGA | 3055 | UCUGGAUU U GCAGGUGA | 276 |
| 3037 | ACCGUCUG CUGAUGAG GCCGUUAGGC CGAA AGGCUGUU | 3056 | AACAGCCU C CAGACGGU | 277 |
| 3058 | AUCUUGUA CUGAUGAG GCCGUUAGGC CGAA AUGUUGGU | 3057 | ACCAACAU C UACAAGAU | 278 |
| 3060 | GGAUCUUG CUGAUGAG GCCGUUAGGC CGAA AGAUGUUG | 3058 | CAACAUCU A CAAGAUCC | 279 |
| 3067 | AGCAGGAG CUGAUGAG GCCGUUAGGC CGAA AUCUUGUA | 3059 | UACAAGAU C CUCCUGCU | 280 |
| 3070 | UGCAGCAG CUGAUGAG GCCGUUAGGC CGAA AGGAUCUU | 3060 | AAGAUCCU C CUGCUGCA | 281 |
| 3084 | GAAACCUG CUGAUGAG GCCGUUAGGC CGAA ACGCCUGC | 3061 | GCAGGCGU A CAGGUUUC | 282 |
| 3090 | AUGCGUGA CUGAUGAG GCCGUUAGGC CGAA ACCUGUAC | 3062 | GUACAGGU U UCACGCAU | 283 |
| 3091 | CAUGCGUG CUGAUGAG GCCGUUAGGC CGAA AACCUGUA | 3063 | UACAGGUU U CACGCAUG | 284 |
| 3092 | ACAUGCGU CUGAUGAG GCCGUUAGGC CGAA AAACCUGU | 3064 | ACAGGUUU C ACGCAUGU | 285 |
| 3112 | UGAAAUGG CUGAUGAG GCCGUUAGGC CGAA AGCUGCAG | 3065 | CUGCAGCU C CCAUUUCA | 286 |
| 3117 | GCUGAUGA CUGAUGAG GCCGUUAGGC CGAA AUGGGAGC | 3066 | GCUCCCAU U UCAUCAGC | 287 |
| 3118 | UGCUGAUG CUGAUGAG GCCGUUAGGC CGAA AAUGGGAG | 3067 | CUCCCAUU U CAUCAGCA | 288 |
| 3119 | UUGCUGAU CUGAUGAG GCCGUUAGGC CGAA AAAUGGGA | 3068 | UCCCAUUU C AUCAGCAA | 289 |
| 3122 | AACUUGCU CUGAUGAG GCCGUUAGGC CGAA AUGAAAUG | 3069 | CAUUUCAU C AGCAAGUU | 290 |
| 3130 | UUCUUCCA CUGAUGAG GCCGUUAGGC CGAA ACUUGCUG | 3070 | CAGCAAGU U UGGAAGAA | 291 |
| 3131 | GUUCUUCC CUGAUGAG GCCGUUAGGC CGAA AACUUGCU | 3071 | AGCAAGUU U GGAAGAAC | 292 |
| 3147 | GCAGGAAA CUGAUGAG GCCGUUAGGC CGAA AUGUGGGG | 3072 | CCCCACAU U UUUCCUGC | 293 |
| 3148 | CGCAGGAA CUGAUGAG GCCGUUAGGC CGAA AAUGUGGG | 3073 | CCCACAUU U UUCCUGCG | 294 |
| 3149 | GCGCAGGA CUGAUGAG GCCGUUAGGC CGAA AAAUGUGG | 3074 | CCACAUUU U UCCUGCGC | 295 |
| 3150 | CGCGCAGG CUGAUGAG GCCGUUAGGC CGAA AAAAUGUG | 3075 | CACAUUUU U CCUGCGCG | 296 |
| 3151 | ACGCGCAG CUGAUGAG GCCGUUAGGC CGAA AAAAAUGU | 3076 | ACAUUUUU C CUGCGCGU | 297 |
| 3160 | UCAGAGAU CUGAUGAG GCCGUUAGGC CGAA ACGCGCAG | 3077 | CUGCGCGU C AUCUCUGA | 298 |
| 3163 | GUGUCAGA CUGAUGAG GCCGUUAGGC CGAA AUGACGCG | 3078 | CGCGUCAU C UCUGACAC | 299 |
| 3165 | CCGUGUCA CUGAUGAG GCCGUUAGGC CGAA AGAUGACG | 3079 | CGUCAUCU C UGACACGG | 300 |
| 3177 | AGCAGAGG CUGAUGAG GCCGUUAGGC CGAA AGGCCGUG | 3080 | CACGGCCU C CCUCUGCU | 301 |
| 3181 | GAGUAGCA CUGAUGAG GCCGUUAGGC CGAA AGGGAGGC | 3081 | GCCUCCCU C UGCUACUC | 302 |
| 3186 | GGAUGGAG CUGAUGAG GCCGUUAGGC CGAA AGCAGAGG | 3082 | CCUCUGCU A CUCCAUCC | 303 |
| 3189 | UCAGGAUG CUGAUGAG GCCGUUAGGC CGAA AGUAGCAG | 3083 | CUGCUACU C CAUCCUGA | 304 |
| 3193 | GCUUUCAG CUGAUGAG GCCGUUAGGC CGAA AUGGAGUA | 3084 | UACUCCAU C CUGAAAGC | 305 |
| 3219 | CCCCCAGC CUGAUGAG GCCGUUAGGC CGAA ACAUCCCU | 3085 | AGGGAUGU C GCUGGGGG | 306 |
| 3248 | GGAGGGCA CUGAUGAG GCCGUUAGGC CGAA AGGGCCGG | 3086 | CCGGCCCU C UGCCCUCC | 307 |
| 3255 | CGGCCUCG CUGAUGAG GCCGUUAGGC CGAA AGGGCAGA | 3087 | UCUGCCCU C CGAGGCCG | 308 |
| 3288 | UGAGCAGG CUGAUGAG GCCGUUAGGC CGAA AUGCUUGG | 3088 | CCAAGCAU U CCUGCUCA | 309 |
| 3289 | UUGAGCAG CUGAUGAG GCCGUUAGGC CGAA AAUGCUUG | 3089 | CAAGCAUU C CUGCUCAA | 310 |
| 3295 | GUCAGCUU CUGAUGAG GCCGUUAGGC CGAA AGCAGGAA | 3090 | UUCCUGCU C AAGCUGAC | 311 |
| 3305 | ACGGUGUC CUGAUGAG GCCGUUAGGC CGAA AGUCAGCU | 3091 | AGCUGACU C GACACCGU | 312 |
| 3316 | ACGUAGGU CUGAUGAG GCCGUUAGGC CGAA ACACGGUG | 3092 | CACCGUGU C ACCUACGU | 313 |
| 3321 | GUGGCACG CUGAUGAG GCCGUUAGGC CGAA AGGUGACA | 3093 | UGUCACCU A CGUGCCAC | 314 |
| 3331 | GACCCCAG CUGAUGAG GCCGUUAGGC CGAA AGUGGCAC | 3094 | GUGCCACU C CUGGGGUC | 315 |
| 3339 | UCCUGAGU CUGAUGAG GCCGUUAGGC CGAA ACCCCAGG | 3095 | CCUGGGGU C ACUCAGGA | 316 |
| 3343 | GCUGUCCU CUGAUGAG GCCGUUAGGC CGAA AGUGACCC | 3096 | GGGUCACU C AGGACAGC | 317 |
| 3368 | GAGCUUCC CUGAUGAG GCCGUUAGGC CGAA ACUCAGCU | 3097 | AGCUGAGU C GGAAGCUC | 318 |
| 3376 | GUCCCCGG CUGAUGAG GCCGUUAGGC CGAA AGCUUCCG | 3098 | CGGAAGCU C CCGGGGAC | 319 |
| 3429 | UGAAGUCU CUGAUGAG GCCGUUAGGC CGAA AGGGCAGU | 3099 | ACUGCCCU C AGACUUCA | 320 |
| 3435 | UGGUCUUG CUGAUGAG GCCGUUAGGC CGAA AGUCUGAG | 3100 | CUCAGACU U CAAGACCA | 321 |
| 3436 | AUGGUCUU CUGAUGAG GCCGUUAGGC CGAA AAGUCUGA | 3101 | UCAGACUU C AAGACCAU | 322 |
| 3445 | CAGUCCAG CUGAUGAG GCCGUUAGGC CGAA AUGGUCUU | 3102 | AAGACCAU C CUGGACUG | 323 |
| 3503 | CCCGGCGU CUGAUGAG GCCGUUAGGC CGAA ACAGGGCU | 3103 | AGCCCUGU C ACGCCGGG | 324 |
| 3514 | GGGACGUA CUGAUGAG GCCGUUAGGC CGAA AGCCCGGC | 3104 | GCCGGGCU C UACGUCCC | 325 |
| 3516 | CUGGGACG CUGAUGAG GCCGUUAGGC CGAA AGAGCCCG | 3105 | CGGGCUCU A CGUCCCAG | 326 |
| 3520 | CUCCCUGG CUGAUGAG GCCGUUAGGC CGAA ACGUAGAG | 3106 | CUCUACGU C CCAGGGAG | 327 |
| 3568 | AGGCCUCA CUGAUGAG GCCGUUAGGC CGAA ACUCCCAG | 3107 | CUGGGAGU C UGAGGCCU | 328 |
| 3587 | CUCGGCCA CUGAUGAG GCCGUUAGGC CGAA ACACUCAC | 3108 | GUGAGUGU U UGGCCGAG | 329 |
| 3588 | CCUCGGCC CUGAUGAG GCCGUUAGGC CGAA AACACUCA | 3109 | UGAGUGUU U GGCCGAGG | 330 |
| 3606 | UUCAGCCG CUGAUGAG GCCGUUAGGC CGAA ACAUGCAG | 3110 | CUGCAUGU C CGGCUGAA | 331 |
| 3625 | CUCAGCCG CUGAUGAG GCCGUUAGGC CGAA ACACUCAG | 3111 | CUGAGUGU C CGGCUGAG | 332 |
| 3648 | CUUGGCUG CUGAUGAG GCCGUUAGGC CGAA ACACUCGC | 3112 | GCGAGUGU C CAGCCAAG | 333 |
| 3667 | GUGUGCUG CUGAUGAG GCCGUUAGGC CGAA ACACUCAG | 3113 | CUGAGUGU C CAGCACAC | 334 |
| 3683 | GAAGUGAA CUGAUGAG GCCGUUAGGC CGAA ACGGCAGG | 3114 | CCUGCCGU C UUCACUUC | 335 |
| 3685 | GCGAAGUG CUGAUGAG GCCGUUAGGC CGAA AGACGGCA | 3115 | UGCCGUCU U CACUUCCC | 336 |
| 3686 | GGGGAAGU CUGAUGAG GCCGUUAGGC CGAA AAGACGGC | 3116 | GCCGUCUU C ACUUCCCC | 337 |
| 3690 | CUGUGGGG CUGAUGAG GCCGUUAGGC CGAA AGUGAAGA | 3117 | UCUUCACU U CCCCACAG | 338 |
| 3691 | CCUGUGGG CUGAUGAG GCCGUUAGGC CGAA AAGUGAAG | 3118 | CUUCACUU C CCCACAGG | 339 |
| 3708 | GUGGAGCC CUGAUGAG GCCGUUAGGC CGAA AGCGCCAG | 3119 | CUGGCGCU C GGCUCCAC | 340 |
| 3713 | CUGGGGUG CUGAUGAG GCCGUUAGGC CGAA AGCCGAGC | 3120 | GCUCGGCU C CACCCCAG | 341 |
| 3730 | GUGAGGAA CUGAUGAG GCCGUUAGGC CGAA AGCUGGCC | 3121 | GGCCAGCU U UUCCUCAC | 342 |
| 3731 | GGUGAGGA CUGAUGAG GCCGUUAGGC CGAA AAGCUGGC | 3122 | GCCAGCUU U UCCUCACC | 343 |
| 3732 | UGGUGAGG CUGAUGAG GCCGUUAGGC CGAA AAAGCUGG | 3123 | CCAGCUUU U CCUCACCA | 344 |
| 3733 | CUGGUGAG CUGAUGAG GCCGUUAGGC CGAA AAAAGCUG | 3124 | CAGCUUUU C CUCACCAG | 345 |
| 3736 | CUCCUGGU CUGAUGAG GCCGUUAGGC CGAA AGGAAAAG | 3125 | CUUUUCCU C ACCAGGAG | 346 |
| 3752 | GGGAGUGG CUGAUGAG GCCGUUAGGC CGAA AGCCGGGC | 3126 | GCCCGGCU U CCACUCCC | 347 |
| 3753 | GGGGAGUG CUGAUGAG GCCGUUAGGC CGAA AAGCCGGG | 3127 | CCCGGCUU C CACUCCCC | 348 |
| 3758 | UAUGUGGG CUGAUGAG GCCGUUAGGC CGAA AGUGGAAG | 3128 | CUUCCACU C CCCACAUA | 349 |
| 3766 | ACUAUUCC CUGAUGAG GCCGUUAGGC CGAA AUGUGGGG | 3129 | CCCCACAU A GGAAUAGU | 350 |
| 3772 | GGAUGGAC CUGAUGAG GCCGUUAGGC CGAA AUUCCUAU | 3130 | AUAGGAAU A GUCCAUCC | 351 |
| 3775 | UGGGGAUG CUGAUGAG GCCGUUAGGC CGAA ACUAUUCC | 3131 | GGAAUAGU C CAUCCCCA | 352 |
| 3779 | AAUCUGGG CUGAUGAG GCCGUUAGGC CGAA AUGGACUA | 3132 | UAGUCCAU C CCCAGAUU | 353 |
| 3787 | CAAUGGCG CUGAUGAG GCCGUUAGGC CGAA AUCUGGGG | 3133 | CCCCAGAU U CGCCAUUG | 354 |
| 3788 | ACAAUGGC CUGAUGAG GCCGUUAGGC CGAA AAUCUGGG | 3134 | CCCAGAUU C GCCAUUGU | 355 |
| 3794 | GGGUGAAC CUGAUGAG GCCGUUAGGC CGAA AUGGCGAA | 3135 | UUCGCCAU U GUUCACCC | 356 |
| 3797 | GAGGGGUG CUGAUGAG GCCGUUAGGC CGAA ACAAUGGC | 3136 | GCCAUUGU U CACCCCUC | 357 |
| 3798 | CGAGGGGU CUGAUGAG GCCGUUAGGC CGAA AACAAUGG | 3137 | CCAUUGUU C ACCCCUCG | 358 |
| 3805 | GGCAGGGC CUGAUGAG GCCGUUAGGC CGAA AGGGGUGA | 3138 | UCACCCCU C GCCCUGCC | 359 |
| 3816 | AGGCAAAG CUGAUGAG GCCGUUAGGC CGAA AGGGCAGG | 3139 | CCUGCCCU C CUUUGCCU | 360 |
| 3819 | GGAAGGCA CUGAUGAG GCCGUUAGGC CGAA AGGAGGGC | 3140 | GCCCUCCU U UGCCUUCC | 361 |
| 3820 | UGGAAGGC CUGAUGAG GCCGUUAGGC CGAA AAGGAGGG | 3141 | CCCUCCUU U GCCUUCCA | 362 |
| 3825 | GGGGGUGG CUGAUGAG GCCGUUAGGC CGAA AGGCAAAG | 3142 | CUUUGCCU U CCACCCCC | 363 |
| 3626 | UGGGGGUG CUGAUGAG GCCGUUAGGC CGAA AAGGCAAA | 3143 | UUUGCCUU C CACCCCCA | 364 |
| 3839 | UCCACCUG CUGAUGAG GCCGUUAGGC CGAA AUGGUGGG | 3144 | CCCACCAU C CAGGUGGA | 365 |
| 3873 | AAUUCCCA CUGAUGAG GCCGUUAGGC CGAA AGCUCCCA | 3145 | UGGGAGCU C UGGGAAUU | 366 |
| 3881 | UCACUCCA CUGAUGAG GCCGUUAGGC CGAA AUUCCCAG | 3146 | CUGGGAAU U UGGAGUGA | 367 |
| 3882 | GUCACUCC CUGAUGAG GCCGUUAGGC CGAA AAUUCCCA | 3147 | UGGGAAUU U GGAGUGAC | 368 |
| 3907 | CGCCUGUG CUGAUGAG GCCGUUAGGC CGAA ACAGGGCA | 3148 | UGCCCUGU A CACAGGCG | 369 |
| 3940 | CCCACAGG CUGAUGAG GCCGUUAGGC CGAA ACCCCCAU | 3149 | AUGGGGGU C CCUGUGGG | 370 |
| 3950 | CCCAAUUU CUGAUGAG GCCGUUAGGC CGAA ACCCACAG | 3150 | CUGUGGGU C AAAUUGGG | 371 |
| 3955 | CUCCCCCC CUGAUGAG GCCGUUAGGC CGAA AUUUGACC | 3151 | GGUCAAAU U GGGGGGAG | 372 |
| 3977 | CAGUAUUU CUGAUGAG GCCGUUAGGC CGAA ACUCCCAC | 3152 | GUGGGAGU A AAAUACUG | 373 |
| 3982 | AUAUUCAG CUGAUGAG GCCGUUAGGC CGAA AUUUUACU | 3153 | AGUAAAAU A CUGAAUAU | 374 |
| 3989 | AACUCAUA CUGAUGAG GCCGUUAGGC CGAA AUUCAGUA | 3154 | UACUGAAU A UAUGAGUU | 375 |
| 3991 | AAAACUCA CUGAUGAG GCCGUUAGGC CGAA AUAUUCAG | 3155 | CUGAAUAU A UGAGUUUU | 376 |
| 3997 | AACUGAAA CUGAUGAG GCCGUUAGGC CGAA ACUCAUAU | 3156 | AUAUGAGU U UUUCAGUU | 377 |
| 3998 | AAACUGAA CUGAUGAG GCCGUUAGGC CGAA AACUCAUA | 3157 | UAUGAGUU U UUCAGUUU | 378 |
| 3999 | AAAACUGA CUGAUGAG GCCGUUAGGC CGAA AAACUCAU | 3158 | AUGAGUUU U UCAGUUUU | 379 |
| 4000 | CAAAACUG CUGAUGAG GCCGUUAGGC CGAA AAAACUCA | 3159 | UGAGUUUU U CAGUUUUG | 380 |
| 4001 | UCAAAACU CUGAUGAG GCCGUUAGGC CGAA AAAAACUC | 3160 | GAGUUUUU C AGUUUUGA | 381 |
| 4005 | UUUUUCAA CUGAUGAG GCCGUUAGGC CGAA ACUGAAAA | 3161 | UUUUCAGU U UUGAAAAA | 382 |
| 4006 | UUUUUUCA CUGAUGAG GCCGUUAGGC CGAA AACUGAAA | 3162 | UUUCAGUU U UGAAAAAA | 383 |
| 4007 | UUUUUUUC CUGAUGAG GCCGUUAGGC CGAA AAACUGAA | 3163 | UUCAGUUU U GAAAAAAA | 384 |

Stem Length = 8.
Core Sequence = CUGAUGAG GCCGUUAGGC CGAA
Seq1 = TERT (Homo sapiens telomerase reverse transcriptase (TERT) mRNA, 4015 bp); Nakamura et al., Science 277 (5328), 955-959 (1997)

[0183] TABLE IV
Human telomerase reverse transcriptase (TERT) NCH Ribozyme and Target Sequence

| nt. | | Seq ID | Substrate | Seq ID |
|---|---|---|---|---|
| Position | Ribozyme Sequence | Nos | Sequence | Nos |
| 14 | GCGCAGCA CUGAUGAG GCCGUUAGGC CGAA IACGCAGC | 385 | GCUGCGUC C UGCUGCGC | 3164 |
| 15 | UGCGCAGC CUGAUGAG GCCGUUAGGC CGAA IGACGCAG | 386 | CUGCGUCC U GCUGCGCA | 3165 |
| 18 | ACGUGCGC CUGAUGAG GCCGUUAGGC CGAA ICAGGACG | 387 | CGUCCUGC U GCGCACGU | 3166 |
| 23 | UUCCCACG CUGAUGAG GCCGUUAGGC CGAA ICGCAGCA | 388 | UGCUGCGC A CGUGGGAA | 3167 |
| 34 | GGGGCCAG CUGAUGAG GCCGUUAGGC CGAA ICUUCCCA | 389 | UGGGAAGC C CUGGCCCC | 3168 |
| 35 | CGGGGCCA CUGAUGAG GCCGUUAGGC CGAA IGCUUCCC | 390 | GGGAAGCC C UGGCCCCG | 3169 |
| 36 | CCGGGGCC CUGAUGAG GCCGUUAGGC CGAA IGGCUUCC | 391 | GGAAGCCC U GGCCCCGG | 3170 |
| 40 | GUGGCCGG CUGAUGAG GCCGUUAGGC CGAA ICCAGGGC | 392 | GCCCUGGC C CCGGCCAC | 3171 |
| 41 | GGUGGCCG CUGAUGAG GCCGUUAGGC CGAA IGCCAGGG | 393 | CCCUGGCC C CGGCCACC | 3172 |
| 42 | GGGUGGCC CUGAUGAG GCCGUUAGGC CGAA IGGCCAGG | 394 | CCUGGCCC C GGCCACCC | 3173 |
| 46 | GCGGGGGU CUGAUGAG GCCGUUAGGC CGAA ICCGGGGC | 395 | GCCCCGGC C ACCCCCGC | 3174 |
| 47 | CGCGGGGG CUGAUGAG GCCGUUAGGC CGAA IGCCGGGG | 396 | CCCCGGCC A CCCCCGCG | 3175 |
| 49 | AUCGCGGG CUGAUGAG GCCGUUAGGC CGAA IUGGCCGG | 397 | CCGGCCAC C CCCGCGAU | 3176 |
| 50 | CAUCGCGG CUGAUGAG GCCGUUAGGC CGAA IGUGGCCG | 398 | CGGCCACC C CCGCGAUG | 3177 |
| 51 | GCAUCGCG CUGAUGAG GCCGUUAGGC CGAA IGGUGGCC | 399 | GGCCACCC C CGCGAUGC | 3178 |
| 52 | GGCAUCGC CUGAUGAG GCCGUUAGGC CGAA IGGGUGGC | 400 | GCCACCCC C GCGAUGCC | 3179 |
| 60 | GAGCGCGC CUGAUGAG GCCGUUAGGC CGAA ICAUCGCG | 401 | CGCGAUGC C GCGCGCUC | 3180 |
| 67 | CAGCGGGG CUGAUGAG GCCGUUAGGC CGAA ICGCGCGG | 402 | CCGCGCGC U CCCCGCUG | 3181 |
| 69 | GGCAGCGG CUGAUGAG GCCGUUAGGC CGAA IAGCGCGC | 403 | GCGCGCUC C CCGCUGCC | 3182 |
| 70 | CGGCAGCG CUGAUGAG GCCGUUAGGC CGAA IGAGCGCG | 404 | CGCGCUCC C CGCUGCCG | 3183 |
| 71 | UCGGCAGC CUGAUGAG GCCGUUAGGC CGAA IGGAGCGC | 405 | GCGCUCCC C GCUGCCGA | 3184 |
| 74 | GGCUCGGC CUGAUGAG GCCGUUAGGC CGAA ICGGGGAG | 406 | CUCCCCGC U GCCGAGCC | 3185 |
| 77 | CACGGCUC CUGAUGAG GCCGUUAGGC CGAA ICAGCGGG | 407 | CCCGCUGC C GAGCCGUG | 3186 |
| 82 | GAGCGCAC CUGAUGAG GCCGUUAGGC CGAA ICUCGGCA | 408 | UGCCGAGC C GUGCGCUC | 3187 |
| 89 | CAGCAGGG CUGAUGAG GCCGUUAGGC CGAA ICGCACGG | 409 | CCGUGCGC U CCCUGCUG | 3188 |
| 91 | CGCAGCAG CUGAUGAG GCCGUUAGGC CGAA IAGCGCAC | 410 | GUGCGCUC C CUGCUGCG | 3189 |
| 92 | GCGCAGCA CUGAUGAG GCCGUUAGGC CGAA IGAGCGCA | 411 | UGCGCUCC C UGCUGCGC | 3190 |
| 93 | UGCGCAGC CUGAUGAG GCCGUUAGGC CGAA IGGAGCGC | 412 | GCGCUCCC U GCUGCGCA | 3191 |
| 96 | GGCUGCGC CUGAUGAG GCCGUUAGGC CGAA ICAGGGAG | 413 | CUCCCUGC U GCGCAGCC | 3192 |
| 101 | GUAGUGGC CUGAUGAG GCCGUUAGGC CGAA ICGCAGCA | 414 | UGCUGCGC A GCCACUAC | 3193 |
| 104 | GCGGUAGU CUGAUGAG GCCGUUAGGC CGAA ICUGCGCA | 415 | UGCGCAGC C ACUACCGC | 3194 |
| 105 | CGCGGUAG CUGAUGAG GCCGUUAGGC CGAA IGCUGCGC | 416 | GCGCAGCC A CUACCGCG | 3195 |
| 107 | CUCGCGGU CUGAUGAG GCCGUUAGGC CGAA IUGGCUGC | 417 | GCAGCCAC U ACCGCGAG | 3196 |
| 110 | CACCUCGC CUGAUGAG GCCGUUAGGC CGAA IUAGUGGC | 418 | GCCACUAC C GCGAGGUG | 3197 |
| 120 | CCAGCGGC CUGAUGAG GCCGUUAGGC CGAA ICACCUCG | 419 | CGAGGUGC U GCCGCUGG | 3198 |
| 123 | UGGCCAGC CUGAUGAG GCCGUUAGGC CGAA ICAGCACC | 420 | GGUGCUGC C GCUGGCCA | 3199 |
| 126 | ACGUGGCC CUGAUGAG GCCGUUAGGC CGAA ICGGCAGC | 421 | GCUGCCGC U GGCCACGU | 3200 |
| 130 | ACGAACGU CUGAUGAG GCCGUUAGGC CGAA ICCAGCGG | 422 | CCGCUGGC C ACGUUCGU | 3201 |
| 131 | CACGAACG CUGAUGAG GCCGUUAGGC CGAA IGCCAGCG | 423 | CGCUGGCC A CGUUCGUG | 3202 |
| 146 | GGGCCCCA CUGAUGAG GCCGUUAGGC CGAA ICGCCGCA | 424 | UGCGGCGC C UGGGGCCC | 3203 |
| 147 | GGGGCCCC CUGAUGAG GCCGUUAGGC CGAA IGCGCCGC | 425 | GCGGCGCC U GGGGCCCC | 3204 |
| 153 | AGCCCUGG CUGAUGAG GCCGUUAGGC CGAA ICCCCAGG | 426 | CCUGGGGC C CCAGGGCU | 3205 |
| 154 | CAGCCCUG CUGAUGAG GCCGUUAGGC CGAA IGCCCCAG | 427 | CUGGGGCC C CAGGGCUG | 3206 |
| 155 | CCAGCCCU CUGAUGAG GCCGUUAGGC CGAA IGGCCCCA | 428 | UGGGGCCC C AGGGCUGG | 3207 |
| 156 | GCCAGCCC CUGAUGAG GCCGUUAGGC CGAA IGGGCCCC | 429 | GGGGCCCC A GGGCUGGC | 3208 |
| 161 | CAGCCGCC CUGAUGAG GCCGUUAGGC CGAA ICCCUGGG | 430 | CCCAGGGC U GGCGGCUG | 3209 |
| 168 | GCUGCACC CUGAUGAG GCCGUUAGGC CGAA ICCGCCAG | 431 | CUGGCGGC U GGUGCAGC | 3210 |
| 174 | CCCCGCGC CUGAUGAG GCCGUUAGGC CGAA ICACCAGC | 432 | GCUGGUGC A GCGCGGGG | 3211 |
| 185 | AGCCGCCG CUGAUGAG GCCGUUAGGC CGAA IUCCCCGC | 433 | GCGGGGAC C CGGCGGCU | 3212 |
| 186 | AAGCCGCC CUGAUGAG GCCGUUAGGC CGAA IGUCCCCG | 434 | CGGGGACC C GGCGGCUU | 3213 |
| 193 | GCGCGGAA CUGAUGAG GCCGUUAGGC CGAA ICCGCCGG | 435 | CCGGCGGC U UUCCGCGC | 3214 |
| 197 | CAGCGCGC CUGAUGAG GCCGUUAGGC CGAA IAAAGCCG | 436 | CGGCUUUC C GCGCGCUG | 3215 |
| 204 | GGGCCACC CUGAUGAG GCCGUUAGGC CGAA ICGCGCGG | 437 | CCGCGCGC U GGUGGCCC | 3216 |
| 211 | AGGCACUG CUGAUGAG GCCGUUAGGC CGAA ICCACCAG | 438 | CUGGUGGC C CAGUGCCU | 3217 |
| 212 | CAGGCACU CUGAUGAG GCCGUUAGGC CGAA IGCCACCA | 439 | UGGUGGCC C AGUGCCUG | 3218 |
| 213 | CCAGGCAC CUGAUGAG GCCGUUAGGC CGAA IGGCCACC | 440 | GGUGGCCC A GUGCCUGG | 3219 |
| 218 | GCACACCA CUGAUGAG GCCGUUAGGC CGAA ICACUGGG | 441 | CCCAGUGC C UGGUGUGC | 3220 |
| 219 | CGCACACC CUGAUGAG GCCGUUAGGC CGAA IGCACUGG | 442 | CCAGUGCC U GGUGUGCG | 3221 |
| 231 | CGUCCCAG CUGAUGAG GCCGUUAGGC CGAA ICACGCAC | 443 | GUGCGUGC C CUGGGACG | 3222 |
| 232 | GCGUCCCA CUGAUGAG GCCGUUAGGC CGAA IGCACGCA | 444 | UGCGUGCC C UGGGACGC | 3223 |
| 233 | UGCGUCCC CUGAUGAG GCCGUUAGGC CGAA IGGCACGC | 445 | GCGUGCCC U GGGACGCA | 3224 |
| 241 | GGCGGCCG CUGAUGAG GCCGUUAGGC CGAA ICGUCCCA | 446 | UGGGACGC A CGGCCGCC | 3225 |
| 246 | CGGGGGGC CUGAUGAG GCCGUUAGGC CGAA ICCGUGCG | 447 | CGCACGGC C GCCCCCCG | 3226 |
| 249 | CGGCGGGG CUGAUGAG GCCGUUAGGC CGAA ICGGCCGU | 448 | ACGGCCGC C CCCCGCCG | 3227 |
| 250 | GCGGCGGG CUGAUGAG GCCGUUAGGC CGAA IGCGGCCG | 449 | CGGCCGCC C CCCGCCGC | 3228 |
| 251 | GGCGGCGG CUGAUGAG GCCGUUAGGC CGAA IGGCGGCC | 450 | GGCCGCCC C CCGCCGCC | 3229 |
| 252 | GGGCGGCG CUGAUGAG GCCGUUAGGC CGAA IGGGCGGC | 451 | GCCGCCCC C CGCCGCCC | 3230 |
| 253 | GGGGCGGC CUGAUGAG GCCGUUAGGC CGAA IGGGGCGG | 452 | CCGCCCCC C GCCGCCCC | 3231 |
| 256 | GAGGGGGC CUGAUGAG GCCGUUAGGC CGAA ICGGGGGG | 453 | CCCCCCGC C GCCCCCUC | 3232 |
| 259 | AAGGAGGG CUGAUGAG GCCGUUAGGC CGAA ICGGCGGG | 454 | CCCGCCGC C CCCUCCUU | 3233 |
| 260 | GAAGGAGG CUGAUGAG GCCGUUAGGC CGAA IGCGGCGG | 455 | CCGCCGCC C CCUCCUUC | 3234 |
| 261 | GGAAGGAG CUGAUGAG GCCGUUAGGC CGAA IGGCGGCG | 456 | CGCCGCCC C CUCCUUCC | 3235 |
| 262 | CGGAAGGA CUGAUGAG GCCGUUAGGC CGAA IGGGCGGC | 457 | GCCGCCCC C UCCUUCCG | 3236 |
| 263 | GCGGAAGG CUGAUGAG GCCGUUAGGC CGAA IGGGGCGG | 458 | CCGCCCCC U CCUUCCGC | 3237 |
| 265 | UGGCGGAA CUGAUGAG GCCGUUAGGC CGAA IAGGGGGC | 459 | GCCCCCUC C UUCCGCCA | 3238 |
| 266 | CUGGCGGA CUGAUGAG GCCGUUAGGC CGAA IGAGGGGG | 460 | CCCCCUCC U UCCGCCAG | 3239 |
| 269 | CACCUGGC CUGAUGAG GCCGUUAGGC CGAA IAAGGAGG | 461 | CCUCCUUC C GCCAGGUG | 3240 |
| 272 | GGACACCU CUGAUGAG GCCGUUAGGC CGAA ICGGAAGG | 462 | CCUUCCGC C AGGUGUCC | 3241 |
| 273 | AGGACACC CUGAUGAG GCCGUUAGGC CGAA IGCGGAAG | 463 | CUUCCGCC A GGUGUCCU | 3242 |
| 280 | UUCAGGCA CUGAUGAG GCCGUUAGGC CGAA IACACCUG | 464 | CAGGUGUC C UGCCUGAA | 3243 |
| 281 | CUUCAGGC CUGAUGAG GCCGUUAGGC CGAA IGACACCU | 465 | AGGUGUCC U GCCUGAAG | 3244 |
| 284 | CUCCUUCA CUGAUGAG GCCGUUAGGC CGAA ICAGGACA | 466 | UGUCCUGC C UGAAGGAG | 3245 |
| 285 | GCUCCUUC CUGAUGAG GCCGUUAGGC CGAA IGCAGGAC | 467 | GUCCUGCC U GAAGGAGC | 3246 |
| 294 | GGGCCACC CUGAUGAG GCCGUUAGGC CGAA ICUCCUUC | 468 | GAAGGAGC U GGUGGCCC | 3247 |
| 301 | AGCACUCG CUGAUGAG GCCGUUAGGC CGAA ICCACCAG | 469 | CUGGUGGC C CGAGUGCU | 3248 |
| 302 | CAGCACUC CUGAUGAG GCCGUUAGGC CGAA IGCCACCA | 470 | UGGUGGCC C GAGUGCUG | 3249 |
| 309 | GCCUCUGC CUGAUGAG GCCGUUAGGC CGAA ICACUCGG | 471 | CCGAGUGC U GCAGAGGC | 3250 |
| 312 | ACAGCCUC CUGAUGAG GCCGUUAGGC CGAA ICAGCACU | 472 | AGUGCUGC A GAGGCUGU | 3251 |
| 318 | GCUCGCAC CUGAUGAG GCCGUUAGGC CGAA ICCUCUGC | 473 | GCAGAGGC U GUGCGAGC | 3252 |
| 345 | CGAAGGCC CUGAUGAG GCCGUUAGGC CGAA ICACGUUC | 474 | GAACGUGC U GGCCUUCG | 3253 |
| 349 | AAGCCGAA CUGAUGAG GCCGUUAGGC CGAA ICCAGCAC | 475 | GUGCUGGC C UUCGGCUU | 3254 |
| 350 | GAAGCCGA CUGAUGAG GCCGUUAGGC CGAA IGCCAGCA | 476 | UGCUGGCC U UCGGCUUC | 3255 |
| 356 | CAGCGCGA CUGAUGAG GCCGUUAGGC CGAA ICCGAAGG | 477 | CCUUCGGC U UCGCGCUG | 3256 |
| 363 | CGUCCAGC CUGAUGAG GCCGUUAGGC CGAA ICGCGAAG | 478 | CUUCGCGC U GCUGGACG | 3257 |
| 366 | CCCCGUCC CUGAUGAG GCCGUUAGGC CGAA ICAGCGCG | 479 | CGCGCUGC U GGACGGGG | 3258 |
| 376 | CCCCCGCG CUGAUGAG GCCGUUAGGC CGAA ICCCCGUC | 480 | GACGGGGC C CGCGGGGG | 3259 |
| 377 | GCCCCCGC CUGAUGAG GCCGUUAGGC CGAA IGCCCCGU | 481 | ACGGGGCC C GCGGGGGC | 3260 |
| 386 | CUCGGGGG CUGAUGAG GCCGUUAGGC CGAA ICCCCCGC | 482 | GCGGGGGC C CCCCCGAG | 3261 |
| 387 | CCUCGGGG CUGAUGAG GCCGUUAGGC CGAA IGCCCCCG | 483 | CGGGGGCC C CCCCGAGG | 3262 |
| 388 | GCCUCGGG CUGAUGAG GCCGUUAGGC CGAA IGGCCCCC | 484 | GGGGGCCC C CCCGAGGC | 3263 |
| 389 | GGCCUCGG CUGAUGAG GCCGUUAGGC CGAA IGGGCCCC | 485 | GGGGCCCC C CCGAGGCC | 3264 |
| 390 | AGGCCUCG CUGAUGAG GCCGUUAGGC CGAA IGGGGCCC | 486 | GGGCCCCC C CGAGGCCU | 3265 |
| 391 | AAGGCCUC CUGAUGAG GCCGUUAGGC CGAA IGGGGGCC | 487 | GGCCCCCC C GAGGCCUU | 3266 |
| 397 | GUGGUGAA CUGAUGAG GCCGUUAGGC CGAA ICCUCGGG | 488 | CCCGAGGC C UUCACCAC | 3267 |
| 398 | GGUGGUGA CUGAUGAG GCCGUUAGGC CGAA IGCCUCGG | 489 | CCGAGGCC U UCACCACC | 3268 |
| 401 | GCUGGUGG CUGAUGAG GCCGUUAGGC CGAA IAAGGCCU | 490 | AGGCCUUC A CCACCAGC | 3269 |
| 403 | ACGCUGGU CUGAUGAG GCCGUUAGGC CGAA IUGAAGGC | 491 | GCCUUCAC C ACCAGCGU | 3270 |
| 404 | CACGCUGG CUGAUGAG GCCGUUAGGC CGAA IGUGAAGG | 492 | CCUUCACC A CCAGCGUG | 3271 |
| 406 | CGCACGCU CUGAUGAG GCCGUUAGGC CGAA IUGGUGAA | 493 | UUCACCAC C AGCGUGCG | 3272 |
| 407 | GCGCACGC CUGAUGAG GCCGUUAGGC CGAA IGUGGUGA | 494 | UCACCACC A GCGUGCGC | 3273 |
| 416 | CAGGUAGC CUGAUGAG GCCGUUAGGC CGAA ICGCACGC | 495 | GCGUGCGC A GCUACCUG | 3274 |
| 419 | GGGCAGGU CUGAUGAG GCCGUUAGGC CGAA ICUGCGCA | 496 | UGCGCAGC U ACCUGCCC | 3275 |
| 422 | GUUGGGCA CUGAUGAG GCCGUUAGGC CGAA IUAGCUGC | 497 | GCAGCUAC C UGCCCAAC | 3276 |
| 423 | UGUUGGGC CUGAUGAG GCCGUUAGGC CGAA IGUAGCUG | 498 | CAGCUACC U GCCCAACA | 3277 |
| 426 | CCGUGUUG CUGAUGAG GCCGUUAGGC CGAA ICAGGUAG | 499 | CUACCUGC C CAACACGG | 3278 |
| 427 | ACCGUGUU CUGAUGAG GCCGUUAGGC CGAA IGCAGGUA | 500 | UACCUGCC C AACACGGU | 3279 |
| 428 | CACCGUGU CUGAUGAG GCCGUUAGGC CGAA IGGCAGGU | 501 | ACCUGCCC A ACACGGUG | 3280 |
| 431 | GGUCACCG CUGAUGAG GCCGUUAGGC CGAA IUUGGGCA | 502 | UGCCCAAC A CGGUGACC | 3281 |
| 439 | AGUGCGUC CUGAUGAG GCCGUUAGGC CGAA IUCACCGU | 503 | ACGGUGAC C GACGCACU | 3282 |
| 445 | CCCCGCAG CUGAUGAG GCCGUUAGGC CGAA ICGUCGGU | 504 | ACCGACGC A CUGCGGGG | 3283 |
| 447 | UCCCCCGC CUGAUGAG GCCGUUAGGC CGAA IUGCGUCG | 505 | CGACGCAC U GCGGGGGA | 3284 |
| 471 | GCAGCAGC CUGAUGAG GCCGUUAGGC CGAA ICCCCCAC | 506 | GUGGGGGC U GCUGCUGC | 3285 |
| 474 | GGCGCAGC CUGAUGAG GCCGUUAGGC CGAA ICAGCCCC | 507 | GGGGCUGC U GCUGCGCC | 3286 |
| 477 | CGCGGCGC CUGAUGAG GCCGUUAGGC CGAA ICAGCAGC | 508 | GCUGCUGC U GCGCCGCG | 3287 |
| 482 | GCCCACGC CUGAUGAG GCCGUUAGGC CGAA ICGCAGCA | 509 | UGCUGCGC C GCGUGGGC | 3288 |
| 501 | GGUGAACC CUGAUGAG GCCGUUAGGC CGAA ICACGUCG | 510 | CGACGUGC U GGUUCACC | 3289 |
| 507 | CCAGCAGG CUGAUGAG GCCGUUAGGC CGAA IAACCAGC | 511 | GCUGGUUC A CCUGCUGG | 3290 |
| 509 | UGCCAGCA CUGAUGAG GCCGUUAGGC CGAA IUGAACCA | 512 | UGGUUCAC C UGCUGGCA | 3291 |
| 510 | GUGCCAGC CUGAUGAG GCCGUUAGGC CGAA IGUGAACC | 513 | GGUUCACC U GCUGGCAC | 3292 |
| 513 | AGCGUGCC CUGAUGAG GCCGUUAGGC CGAA ICAGGUGA | 514 | UCACCUGC U GGCACGCU | 3293 |
| 517 | GCGCAGCG CUGAUGAG GCCGUUAGGC CGAA ICCAGCAG | 515 | CUGCUGGC A CGCUGCGC | 3294 |
| 521 | GAGCGCGC CUGAUGAG GCCGUUAGGC CGAA ICGUGCCA | 516 | UGGCACGC U GCGCGCUC | 3295 |
| 528 | GCACAAAG CUGAUGAG GCCGUUAGGC CGAA ICGCGCAG | 517 | CUGCGCGC U CUUUGUGC | 3296 |
| 530 | CAGCACAA CUGAUGAG GCCGUUAGGC CGAA IAGCGCGC | 518 | GCGCGCUC U UUGUGCUG | 3297 |
| 537 | GAGCCACC CUGAUGAG GCCGUUAGGC CGAA ICACAAAG | 519 | CUUUGUGC U GGUGGCUC | 3298 |
| 544 | CAGCUGGG CUGAUGAG GCCGUUAGGC CGAA ICCACCAG | 520 | CUGGUGGC U CCCAGCUG | 3299 |
| 546 | CGCAGCUG CUGAUGAG GCCGUUAGGC CGAA IAGCCACC | 521 | GGUGGCUC C CAGCUGCG | 3300 |
| 547 | GCGCAGCU CUGAUGAG GCCGUUAGGC CGAA IGAGCCAC | 522 | GUGGCUCC C AGCUGCGC | 3301 |
| 548 | GGCGCAGC CUGAUGAG GCCGUUAGGC CGAA IGGAGCCA | 523 | UGGCUCCC A GCUGCGCC | 3302 |
| 551 | GUAGGCGC CUGAUGAG GCCGUUAGGC CGAA ICUGGGAG | 524 | CUCCCAGC U GCGCCUAC | 3303 |
| 556 | ACCUGGUA CUGAUGAG GCCGUUAGGC CGAA ICGCAGCU | 525 | AGCUGCGC C UACCAGGU | 3304 |
| 557 | CACCUGGU CUGAUGAG GCCGUUAGGC CGAA IGCGCAGC | 526 | GCUGCGCC U ACCAGGUG | 3305 |
| 560 | GCACACCU CUGAUGAG GCCGUUAGGC CGAA IUAGGCGC | 527 | GCGCCUAC C AGGUGUGC | 3306 |
| 561 | CGCACACC CUGAUGAG GCCGUUAGGC CGAA IGUAGGCG | 528 | CGCCUACC A GGUGUGCG | 3307 |
| 573 | ACAGCGGC CUGAUGAG GCCGUUAGGC CGAA ICCCGCAC | 529 | GUGCGGGC C GCCGCUGU | 3308 |
| 576 | GGUACAGC CUGAUGAG GCCGUUAGGC CGAA ICGGCCCG | 530 | CGGGCCGC C GCUGUACC | 3309 |
| 579 | GCUGGUAC CUGAUGAG GCCGUUAGGC CGAA ICGGCGGC | 531 | GCCGCCGC U GUACCAGC | 3310 |
| 584 | GCCGAGCU CUGAUGAG GCCGUUAGGC CGAA IUACAGCG | 532 | CGCUGUAC C AGCUCGGC | 3311 |
| 585 | CGCCGAGC CUGAUGAG GCCGUUAGGC CGAA IGUACAGC | 533 | GCUGUACC A GCUCGGCG | 3312 |
| 588 | CAGCGCCG CUGAUGAG GCCGUUAGGC CGAA ICUGGUAC | 534 | GUACCAGC U CGGCGCUG | 3313 |
| 595 | UGAGUGGC CUGAUGAG GCCGUUAGGC CGAA ICGCCGAG | 535 | CUCGGCGC U GCCACUCA | 3314 |
| 598 | GCCUGAGU CUGAUGAG GCCGUUAGGC CGAA ICAGCGCC | 536 | GGCGCUGC C ACUCAGGC | 3315 |
| 599 | GGCCUGAG CUGAUGAG GCCGUUAGGC CGAA IGCAGCGC | 537 | GCGCUGCC A CUCAGGCC | 3316 |
| 601 | CGGGCCUG CUGAUGAG GCCGUUAGGC CGAA IUGGCAGC | 538 | GCUGCCAC U CAGGCCCG | 3317 |
| 603 | GCCGGGCC CUGAUGAG GCCGUUAGGC CGAA IAGUGGCA | 539 | UGCCACUC A GGCCCGGC | 3318 |
| 607 | GGGGGCCG CUGAUGAG GCCGUUAGGC CGAA ICCUGAGU | 540 | ACUCAGGC C CGGCCCCC | 3319 |
| 608 | CGGGGGCC CUGAUGAG GCCGUUAGGC CGAA IGCCUGAG | 541 | CUCAGGCC C GGCCCCCG | 3320 |
| 612 | GUGGCGGG CUGAUGAG GCCGUUAGGC CGAA ICCGGGCC | 542 | GGCCCGGC C CCCGCCAC | 3321 |
| 613 | UGUGGCGG CUGAUGAG GCCGUUAGGC CGAA IGCCGGGC | 543 | GCCCGGCC C CCGCCACA | 3322 |
| 614 | GUGUGGCG CUGAUGAG GCCGUUAGGC CGAA IGGCCGGG | 544 | CCCGGCCC C CGCCACAC | 3323 |
| 615 | CGUGUGGC CUGAUGAG GCCGUUAGGC CGAA IGGGCCGG | 545 | CCGGCCCC C GCCACACG | 3324 |
| 618 | UAGCGUGU CUGAUGAG GCCGUUAGGC CGAA ICGGGGGC | 546 | GCCCCCGC C ACACGCUA | 3325 |
| 619 | CUAGCGUG CUGAUGAG GCCGUUAGGC CGAA IGCGGGGG | 547 | CCCCCGCC A CACGCUAG | 3326 |
| 621 | CACUAGCG CUGAUGAG GCCGUUAGGC CGAA IUGGCGGG | 548 | CCCGCCAC A CGCUAGUG | 3327 |
| 625 | GGUCCACU CUGAUGAG GCCGUUAGGC CGAA ICGUGUGG | 549 | CCACACGC U AGUGGACC | 3328 |
| 633 | GCCUUCGG CUGAUGAG GCCGUUAGGC CGAA IUCCACUA | 550 | UAGUGGAC C CCGAAGGC | 3329 |
| 634 | CGCCUUCG CUGAUGAG GCCGUUAGGC CGAA IGUCCACU | 551 | AGUGGACC C CGAAGGCG | 3330 |
| 635 | ACGCCUUC CUGAUGAG GCCGUUAGGC CGAA IGGUCCAC | 552 | GUGGACCC C GAAGGCGU | 3331 |
| 645 | CGCAUCCC CUGAUGAG GCCGUUAGGC CGAA IACGCCUU | 553 | AAGGCGUC U GGGAUGCG | 3332 |
| 661 | UGGUUCCA CUGAUGAG GCCGUUAGGC CGAA ICCCGUUC | 554 | GAACGGGC C UGGAACCA | 3333 |
| 662 | AUGGUUCC CUGAUGAG GCCGUUAGGC CGAA IGCCCGUU | 555 | AACGGGCC U GGAACCAU | 3334 |
| 668 | GACGCUAU CUGAUGAG GCCGUUAGGC CGAA IUUCCAGG | 556 | CCUGGAAC C AUAGCGUC | 3335 |
| 669 | UGACGCUA CUGAUGAG GCCGUUAGGC CGAA IGUUCCAG | 557 | CUGGAACC A UAGCGUCA | 3336 |
| 677 | GGCCUCCC CUGAUGAG GCCGUUAGGC CGAA IACGCUAU | 558 | AUAGCGUC A GGGAGGCC | 3337 |
| 685 | GGGACCCC CUGAUGAG GCCGUUAGGC CGAA ICCUCCCU | 559 | AGGGAGGC C GGGGUCCC | 3338 |
| 692 | GCCCAGGG CUGAUGAG GCCGUUAGGC CGAA IACCCCGG | 560 | CCGGGGUC C CCCUGGGC | 3339 |
| 693 | GGCCCAGG CUGAUGAG GCCGUUAGGC CGAA IGACCCCG | 561 | CGGGGUCC C CCUGGGCC | 3340 |
| 694 | AGGCCCAG CUGAUGAG GCCGUUAGGC CGAA IGGACCCC | 562 | GGGGUCCC C CUGGGCCU | 3341 |
| 695 | CAGGCCCA CUGAUGAG GCCGUUAGGC CGAA IGGGACCC | 563 | GGGUCCCC C UGGGCCUG | 3342 |
| 696 | GCAGGCCC CUGAUGAG GCCGUUAGGC CGAA IGGGGACC | 564 | GGUCCCCC U GGGCCUGC | 3343 |
| 701 | GGCUGGCA CUGAUGAG GCCGUUAGGC CGAA ICCCAGGG | 565 | CCCUGGGC C UGCCAGCC | 3344 |
| 702 | GGGCUGGC CUGAUGAG GCCGUUAGGC CGAA IGCCCAGG | 566 | CCUGGGCC U GCCAGCCC | 3345 |
| 705 | CCGGGGCU CUGAUGAG GCCGUUAGGC CGAA ICAGGCCC | 567 | GGGCCUGC C AGCCCCGG | 3346 |
| 706 | CCCGGGGC CUGAUGAG GCCGUUAGGC CGAA IGCAGGCC | 568 | GGCCUGCC A GCCCCGGG | 3347 |
| 709 | GCACCCGG CUGAUGAG GCCGUUAGGC CGAA ICUGGCAG | 569 | CUGCCAGC C CCGGGUGC | 3348 |
| 710 | CGCACCCG CUGAUGAG GCCGUUAGGC CGAA IGCUGGCA | 570 | UGCCAGCC C CGGGUGCG | 3349 |
| 711 | UCGCACCC CUGAUGAG GCCGUUAGGC CGAA IGGCUGGC | 571 | GCCAGCCC C GGGUGCGA | 3350 |
| 734 | GCUGGCAC CUGAUGAG GCCGUUAGGC CGAA ICCCCCGC | 572 | GCGGGGGC A GUGCCAGC | 3351 |
| 739 | CUUCGGCU CUGAUGAG GCCGUUAGGC CGAA ICACUGCC | 573 | GGCAGUGC C AGCCGAAG | 3352 |
| 740 | ACUUCGGC CUGAUGAG GCCGUUAGGC CGAA IGCACUGC | 574 | GCAGUGCC A GCCGAAGU | 3353 |
| 743 | CAGACUUC CUGAUGAG GCCGUUAGGC CGAA ICUGGCAC | 575 | GUGCCAGC C GAAGUCUG | 3354 |
| 750 | GCAACGGC CUGAUGAG GCCGUUAGGC CGAA IACUUCGG | 576 | CCGAAGUC U GCCGUUGC | 3355 |
| 753 | UGGGCAAC CUGAUGAG GCCGUUAGGC CGAA ICAGACUU | 577 | AAGUCUGC C GUUGCCCA | 3356 |
| 759 | GCCUCUUG CUGAUGAG GCCGUUAGGC CGAA ICAACGGC | 578 | GCCGUUGC C CAAGAGGC | 3357 |
| 760 | GGCCUCUU CUGAUGAG GCCGUUAGGC CGAA IGCAACGG | 579 | CCGUUGCC C AAGAGGCC | 3358 |
| 761 | GGGCCUCU CUGAUGAG GCCGUUAGGC CGAA IGGCAACG | 580 | CGUUGCCC A AGAGGCCC | 3359 |
| 768 | CACGCCUG CUGAUGAG GCCGUUAGGC CGAA ICCUCUUG | 581 | CAAGAGGC C CAGGCGUG | 3360 |
| 769 | CCACGCCU CUGAUGAG GCCGUUAGGC CGAA IGCCUCUU | 582 | AAGAGGCC C AGGCGUGG | 3361 |
| 770 | GCCACGCC CUGAUGAG GCCGUUAGGC CGAA IGGCCUCU | 583 | AGAGGCCC A GGCGUGGC | 3362 |
| 781 | UCAGGGGC CUGAUGAG GCCGUUAGGC CGAA ICGCCACG | 584 | CGUGGCGC U GCCCCUGA | 3363 |
| 784 | GGCUCAGG CUGAUGAG GCCGUUAGGC CGAA ICAGCGCC | 585 | GGCGCUGC C CCUGAGCC | 3364 |
| 785 | CGGCUCAG CUGAUGAG GCCGUUAGGC CGAA IGCAGCGC | 586 | GCGCUGCC C CUGAGCCG | 3365 |
| 786 | CCGGCUCA CUGAUGAG GCCGUUAGGC CGAA IGGCAGCG | 587 | CGCUGCCC C UGAGCCGG | 3366 |
| 787 | UCCGGCUC CUGAUGAG GCCGUUAGGC CGAA IGGGCAGC | 588 | GCUGCCCC U GAGCCGGA | 3367 |
| 792 | UCCGCUCC CUGAUGAG GCCGUUAGGC CGAA ICUCAGGG | 589 | CCCUGAGC C GGAGCGGA | 3368 |
| 804 | GCCCAACG CUGAUGAG GCCGUUAGGC CGAA ICGUCCGC | 590 | GCGGACGC C CGUUGGGC | 3369 |
| 805 | UGCCCAAC CUGAUGAG GCCGUUAGGC CGAA IGCGUCCG | 591 | CGGACGCC C GUUGGGCA | 3370 |
| 813 | AGGACCCC CUGAUGAG GCCGUUAGGC CGAA ICCCAACG | 592 | CGUUGGGC A GGGGUCCU | 3371 |
| 820 | UGGGCCCA CUGAUGAG GCCGUUAGGC CGAA IACCCCUG | 593 | CAGGGGUC C UGGGCCCA | 3372 |
| 821 | GUGGGCCC CUGAUGAG GCCGUUAGGC CGAA IGACCCCU | 594 | AGGGGUCC U GGGCCCAC | 3373 |
| 826 | CCCGGGUG CUGAUGAG GCCGUUAGGC CGAA ICCCAGGA | 595 | UCCUGGOC C CACCCGGG | 3374 |
| 827 | GCCCGGGU CUGAUGAG GCCGUUAGGC CGAA IGCCCAGG | 596 | CCUGGGCC C ACCCGGGC | 3375 |
| 828 | UGCCCGGG CUGAUGAG GCCGUUAGGC CGAA IGGCCCAG | 597 | CUGGGCCC A CCCGGGCA | 3376 |
| 830 | CCUGCCCG CUGAUGAG GCCGUUAGGC CGAA IUGGGCCC | 598 | GGGCCCAC C CGGGCAGG | 3377 |
| 831 | UCCUGCCC CUGAUGAG GCCGUUAGGC CGAA IGUGGGCC | 599 | GGCCCACC C GGGCAGGA | 3378 |
| 836 | ACGCGUCC CUGAUGAG GCCGUUAGGC CGAA ICCCGGGU | 600 | ACCCGGGC A GGACGCGU | 3379 |
| 849 | GGUCACUC CUGAUGAG GCCGUUAGGC CGAA IUCCACGC | 601 | GCGUGGAC C GAGUGACC | 3380 |
| 857 | GAAACCAC CUGAUGAG GCCGUUAGGC CGAA IUCACUCG | 602 | CGAGUGAC C GUGGUUUC | 3381 |
| 866 | CACCACAC CUGAUGAG GCCGUUAGGC CGAA IAAACCAC | 603 | GUGGUUUC U GUGUGGUG | 3382 |
| 877 | CUGGCAGG CUGAUGAG GCCGUUAGGC CGAA IACACCAC | 604 | GUGGUGUC A CCUGCCAG | 3383 |
| 879 | GUCUGGCA CUGAUGAG GCCGUUAGGC CGAA IUGACACC | 605 | GGUGUCAC C UGCCAGAC | 3384 |
| 880 | GGUCUGGC CUGAUGAG GCCGUUAGGC CGAA IGUGACAC | 606 | GUGUCACC U GCCAGACC | 3385 |
| 883 | GCGGGUCU CUGAUGAG GCCGUUAGGC CGAA ICAGGUGA | 607 | UCACCUGC C AGACCCGC | 3386 |
| 884 | GGCGGGUC CUGAUGAG GCCGUUAGGC CGAA IGCAGGUG | 608 | CACCUGCC A GACCCGCC | 3387 |
| 888 | CUUCGGCG CUGAUGAG GCCGUUAGGC CGAA IUCUGGCA | 609 | UGCCAGAC C CGCCGAAG | 3388 |
| 889 | UCUUCGGC CUGAUGAG GCCGUUAGGC CGAA IGUCUGGC | 610 | GCCAGACC C GCCGAAGA | 3389 |
| 892 | GCUUCUUC CUGAUGAG GCCGUUAGGC CGAA ICGGGUCU | 611 | AGACCCGC C GAAGAAGC | 3390 |
| 901 | AAAGAGGU CUGAUGAG GCCGUUAGGC CGAA ICUUCUUC | 612 | GAAGAAGC C ACCUCUUU | 3391 |
| 902 | CAAAGAGG CUGAUGAG GCCGUUAGGC CGAA IGCUUCUU | 613 | AAGAAGCC A CCUCUUUG | 3392 |
| 904 | UCCAAAGA CUGAUGAG GCCGUUAGGC CGAA IUGGCUUC | 614 | GAAGCCAC C UCUUUGGA | 3393 |
| 905 | CUCCAAAG CUGAUGAG GCCGUUAGGC CGAA IGUGGCUU | 615 | AAGCCACC U CUUUGGAG | 3394 |
| 907 | CCCUCCAA CUGAUGAG GCCGUUAGGC CGAA IAGGUGGC | 616 | GCCACCUC U UUGGAGGG | 3395 |
| 921 | UGCCAGAG CUGAUGAG GCCGUUAGGC CGAA ICGCACCC | 617 | GGGUGCGC U CUCUGGCA | 3396 |
| 923 | CGUGCCAG CUGAUGAG GCCGUUAGGC CGAA IAGCGCAC | 618 | GUGCGCUC U CUGGCACG | 3397 |
| 925 | CGCGUGCC CUGAUGAG GCCGUUAGGC CGAA IAGAGCGC | 619 | GCGCUCUC U GGCACGCG | 3398 |
| 929 | GUGGCGCG CUGAUGAG GCCGUUAGGC CGAA ICCAGAGA | 620 | UCUCUGGC A CGCGCCAC | 3399 |
| 935 | GUGGGAGU CUGAUGAG GCCGUUAGGC CGAA ICGCGUGC | 621 | GCACGCGC C ACUCCCAC | 3400 |
| 936 | GGUGGGAG CUGAUGAG GCCGUUAGGC CGAA IGCGCGUG | 622 | CACGCGCC A CUCCCACC | 3401 |
| 938 | UGGGUGGG CUGAUGAG GCCGUUAGGC CGAA IUGGCGCG | 623 | CGCGCCAC U CCCACCCA | 3402 |
| 940 | GAUGGGUG CUGAUGAG GCCGUUAGGC CGAA IAGUGGCG | 624 | CGCCACUC C CACCCAUC | 3403 |
| 941 | GGAUGGGU CUGAUGAG GCCGUUAGGC CGAA IGAGUGGC | 625 | GCCACUCC C ACCCAUCC | 3404 |
| 942 | CGGAUGGG CUGAUGAG GCCGUUAGGC CGAA IGGAGUGG | 626 | CCACUCCC A CCCAUCCG | 3405 |
| 944 | CACGGAUG CUGAUGAG GCCGUUAGGC CGAA IUGGGAGU | 627 | ACUCCCAC C CAUCCGUG | 3406 |
| 945 | CCACGGAU CUGAUGAG GCCGUUAGGC CGAA IGUGGGAG | 628 | CUCCCACC C AUCCGUGG | 3407 |
| 946 | CCCACGGA CUGAUGAG GCCGUUAGGC CGAA IGGUGGGA | 629 | UCCCACCC A UCCGUGGG | 3408 |
| 949 | CGGCCCAC CUGAUGAG GCCGUUAGGC CGAA IAUGGGUG | 630 | CACCCAUC C GUGGGCCG | 3409 |
| 956 | GUGCUGGC CUGAUGAG GCCGUUAGGC CGAA ICCCACGG | 631 | CCGUGGGC C GCCAGCAC | 3410 |
| 959 | GUGGUGCU CUGAUGAG GCCGUUAGGC CGAA ICGGCCCA | 632 | UGGGCCGC C AGCACCAC | 3411 |
| 960 | CGUGGUGC CUGAUGAG GCCGUUAGGC CGAA IGCGGCCC | 633 | GGGCCGCC A GCACCACG | 3412 |
| 963 | CCGCGUGG CUGAUGAG GCCGUUAGGC CGAA ICUGGCGG | 634 | CCGCCAGC A CCACGCGG | 3413 |
| 965 | GCCCGCGU CUGAUGAG GCCGUUAGGC CGAA IUGCUGGC | 635 | GCCAGCAC C ACGCGGGC | 3414 |
| 966 | GGCCCGCG CUGAUGAG GCCGUUAGGC CGAA IGUGCUGG | 636 | CCAGCACC A CGCGGGCC | 3415 |
| 974 | GGAUGGGG CUGAUGAG GCCGUUAGGC CGAA ICCCGCGU | 637 | ACGCGGGC C CCCCAUCC | 3416 |
| 975 | UGGAUGGG CUGAUGAG GCCGUUAGGC CGAA IGCCCGCG | 638 | CGCGGGCC C CCCAUCCA | 3417 |
| 976 | GUGGAUGG CUGAUGAG GCCGUUAGGC CGAA IGGCCCGC | 639 | GCGGGCCC C CCAUCCAC | 3418 |
| 977 | UGUGGAUG CUGAUGAG GCCGUUAGGC CGAA IGGGCCCG | 640 | CGGGCCCC C CAUCCACA | 3419 |
| 978 | AUGUGGAU CUGAUGAG GCCGUUAGGC CGAA IGGGGCCC | 641 | GGGCCCCC C AUCCACAU | 3420 |
| 979 | GAUGUGGA CUGAUGAG GCCGUUAGGC CGAA IGGGGGCC | 642 | GGCCCCCC A UCCACAUC | 3421 |
| 982 | CGCGAUGU CUGAUGAG GCCGUUAGGC CGAA IAUGGGGG | 643 | CCCCCAUC C ACAUCGCG | 3422 |
| 983 | CCGCGAUG CUGAUGAG GCCGUUAGGC CGAA IGAUGGGG | 644 | CCCCAUCC A CAUCGCGG | 3423 |
| 985 | GGCCGCGA CUGAUGAG GCCGUUAGGC CGAA IUGGAUGG | 645 | CCAUCCAC A UCGCGGCC | 3424 |
| 993 | GACGUGGU CUGAUGAG GCCGUUAGGC CGAA ICCGCGAU | 646 | AUCGCGGC C ACCACGUC | 3425 |
| 994 | GGACGUGG CUGAUGAG GCCGUUAGGC CGAA IGCCGCGA | 647 | UCGCGGCC A CCACGUCC | 3426 |
| 996 | AGGGACGU CUGAUGAG GCCGUUAGGC CGAA IUGGCCGC | 648 | GCGGCCAC C ACGUCCCU | 3427 |
| 997 | CAGGGACG CUGAUGAG GCCGUUAGGC CGAA IGUGGCCG | 649 | CGGCCACC A CGUCCCUG | 3428 |
| 1002 | UGUCCCAG CUGAUGAG GCCGUUAGGC CGAA IACGUGGU | 650 | ACCACGUC C CUGGGACA | 3429 |
| 1003 | GUGUCCCA CUGAUGAG GCCGUUAGGC CGAA IGACGUGG | 651 | CCACGUCC C UGGGACAC | 3430 |
| 1004 | CGUGUCCC CUGAUGAG GCCGUUAGGC CGAA IGGACGUG | 652 | CACGUCCC U GGGACACG | 3431 |
| 1010 | ACAAGGCG CUGAUGAG GCCGUUAGGC CGAA IUCCCAGG | 653 | CCUGGGAC A CGCCUUGU | 3432 |
| 1014 | GGGGACAA CUGAUGAG GCCGUUAGGC CGAA ICGUGUCC | 654 | GGACACGC C UUGUCCCC | 3433 |
| 1015 | GGGGGACA CUGAUGAG GCCGUUAGGC CGAA IGCGUGUC | 655 | GACACGCC U UGUCCCCC | 3434 |
| 1020 | ACACCGGG CUGAUGAG GCCGUUAGGC CGAA IACAAGGC | 656 | GCCUUGUC C CCCGGUGU | 3435 |
| 1021 | UACACCGG CUGAUGAG GCCGUUAGGC CGAA IGACAAGG | 657 | CCUUGUCC C CCGGUGUA | 3436 |
| 1022 | GUACACCG CUGAUGAG GCCGUUAGGC CGAA IGGACAAG | 658 | CUUGUCCC C CGGUGUAC | 3437 |
| 1023 | CGUACACC CUGAUGAG GCCGUUAGGC CGAA IGGGACAA | 659 | UUGUCCCC C GGUGUACG | 3438 |
| 1033 | UUGGUCUC CUGAUGAG GCCGUUAGGC CGAA ICGUACAC | 660 | GUGUACGC C GAGACCAA | 3439 |
| 1039 | AAGUGCUU CUGAUGAG GCCGUUAGGC CGAA IUCUCGGC | 661 | GCCGAGAC C AAGCACUU | 3440 |
| 1040 | GAAGUGCU CUGAUGAG GCCGUUAGGC CGAA IGUCUCGG | 662 | CCGAGACC A AGCACUUC | 3441 |
| 1044 | AGAGGAAG CUGAUGAG GCCGUUAGGC CGAA ICUUGGUC | 663 | GACCAAGC A CUUCCUCU | 3442 |
| 1046 | GUAGAGGA CUGAUGAG GCCGUUAGGC CGAA IUGCUUGG | 664 | CCAAGCAC U UCCUCUAC | 3443 |
| 1049 | GGAGUAGA CUGAUGAG GCCGUUAGGC CGAA IAAGUGCU | 665 | AGCACUUC C UCUACUCC | 3444 |
| 1050 | AGGAGUAG CUGAUGAG GCCGUUAGGC CGAA IGAAGUGC | 666 | GCACUUCC U CUACUCCU | 3445 |
| 1052 | UGAGGAGU CUGAUGAG GCCGUUAGGC CGAA IAGGAAGU | 667 | ACUUCCUC U ACUCCUCA | 3446 |
| 1055 | GCCUGAGG CUGAUGAG GCCGUUAGGC CGAA IUAGAGGA | 668 | UCCUCUAC U CCUCAGGC | 3447 |
| 1057 | UCGCCUGA CUGAUGAG GCCGUUAGGC CGAA IAGUAGAG | 669 | CUCUACUC C UCAGGCGA | 3448 |
| 1058 | GUCGCCUG CUGAUGAG GCCGUUAGGC CGAA IGAGUAGA | 670 | UCUACUCC U CAGGCGAC | 3449 |
| 1060 | UUGUCGCC CUGAUGAG GCCGUUAGGC CGAA IAGGAGUA | 671 | UACUCCUC A GGCGACAA | 3450 |
| 1067 | CUGCUCCU CUGAUGAG GCCGUUAGGC CGAA IUCGCCUG | 672 | CAGGCGAC A AGGAGCAG | 3451 |
| 1074 | GCCGCAGC CUGAUGAG GCCGUUAGGC CGAA ICUCCUUG | 673 | CAAGGAGC A GCUGCGGC | 3452 |
| 1077 | AGGGCCGC CUGAUGAG GCCGUUAGGC CGAA ICUGCUCC | 674 | GGAGCAGC U GCGGCCCU | 3453 |
| 1083 | GGAAGGAG CUGAUGAG GCCGUUAGGC CGAA ICCGCAGC | 675 | GCUGCGGC C CUCCUUCC | 3454 |
| 1084 | AGGAAGGA CUGAUGAG GCCGUUAGGC CGAA IGCCGCAG | 676 | CUGCGGCC C UCCUUCCU | 3455 |
| 1085 | UAGGAAGG CUGAUGAG GCCGUUAGGC CGAA IGGCCGCA | 677 | UGCGGCCC U CCUUCCUA | 3456 |
| 1087 | AGUAGGAA CUGAUGAG GCCGUUAGGC CGAA IAGGGCCG | 678 | CGGCCCUC C UUCCUACU | 3457 |
| 1088 | GAGUAGGA CUGAUGAG GCCGUUAGGC CGAA IGAGGGCC | 679 | GGCCCUCC U UCCUACUC | 3458 |
| 1091 | GCUGAGUA CUGAUGAG GCCGUUAGGC CGAA IAAGGAGG | 680 | CCUCCUUC C UACUCAGC | 3459 |
| 1092 | AGCUGAGU CUGAUGAG GCCGUUAGGC CGAA IGAAGGAG | 681 | CUCCUUCC U ACUCAGCU | 3460 |
| 1095 | GAGAGCUG CUGAUGAG GCCGUUAGGC CGAA IUAGGAAG | 682 | CUUCCUAC U CAGCUCUC | 3461 |
| 1097 | CAGAGAGC CUGAUGAG GCCGUUAGGC CGAA IAGUAGGA | 683 | UCCUACUC A GCUCUCUG | 3462 |
| 1100 | CCUCAGAG CUGAUGAG GCCGUUAGGC CGAA ICUGAGUA | 684 | UACUCAGC U CUCUGAGG | 3463 |
| 1102 | GGCCUCAG CUGAUGAG GCCGUUAGGC CGAA IAGCUGAG | 685 | CUCAGCUC U CUGAGGCC | 3464 |
| 1104 | UGGGCCUC CUGAUGAG GCCGUUAGGC CGAA IAGAGCUG | 686 | CAGCUCUC U GAGGCCCA | 3465 |
| 1110 | UCAGGCUG CUGAUGAG GCCGUUAGGC CGAA ICCUCAGA | 687 | UCUGAGGC C CAGCCUGA | 3466 |
| 1111 | GUCAGGCU CUGAUGAG GCCGUUAGGC CGAA IGCCUCAG | 688 | CUGAGGCC C AGCCUGAC | 3467 |
| 1112 | AGUCAGGC CUGAUGAG GCCGUUAGGC CGAA IGGCCUCA | 689 | UGAGGCCC A GCCUGACU | 3468 |
| 1115 | GCCAGUCA CUGAUGAG GCCGUUAGGC CGAA ICUGGGCC | 690 | GGCCCAGC C UGACUGOC | 3469 |
| 1116 | COCCAGUC CUGAUGAG GCCGUUAGGC CGAA IGCUGGGC | 691 | GCCCAGCC U GACUGGCG | 3470 |
| 1120 | CGAGCGCC CUGAUGAG GCCGUUAGGC CGAA IUCAGGCU | 692 | AGCCUGAC U GGCGCUCG | 3471 |
| 1126 | AGCCUCCG CUGAUGAG GCCGUUAGGC CGAA ICGCCAGU | 693 | ACUGGCGC U CGGAGGCU | 3472 |
| 1134 | UCUCCACG CUGAUGAG GCCGUUAGGC CGAA ICCUCCGA | 694 | UCGGAGGC U CGUGGAGA | 3473 |
| 1144 | AGAAAGAU CUGAUGAG GCCGUUAGGC CGAA IUCUCCAC | 695 | GUGGAGAC C AUCUUUCU | 3474 |
| 1145 | CAGAAAGA CUGAUGAG GCCGUUAGGC CGAA IGUCUCCA | 696 | UGGAGACC A UCUUUCUG | 3475 |
| 1148 | ACCCAGAA CUGAUGAG GCCGUUAGGC CGAA IAUGGUCU | 697 | AGACCAUC U UUCUGGGU | 3476 |
| 1152 | UGGAACCC CUGAUGAG GCCGUUAGGC CGAA IAAAGAUG | 698 | CAUCUUUC U GGGUUCCA | 3477 |
| 1159 | CAGGGCCU CUGAUGAG GCCGUUAGGC CGAA IAACCCAG | 699 | CUGGGUUC C AGGCCCUG | 3478 |
| 1160 | CCAGGGCC CUGAUGAG GCCGUUAGGC CGAA IGAACCCA | 700 | UGGGUUCC A GGCCCUGG | 3479 |
| 1164 | GCAUCCAG CUGAUGAG GCCGUUAGGC CGAA ICCUGGAA | 701 | UUCCAGGC C CUGGAUGC | 3480 |
| 1165 | GGCAUCCA CUGAUGAG GCCGUUAGGC CGAA IGCCUGGA | 702 | UCCAGGCC C UGGAUGCC | 3481 |
| 1166 | UGGCAUCC CUGAUGAG GCCGUUAGGC CGAA IGGCCUGG | 703 | CCAGGCCC U GGAUGCCA | 3482 |
| 1173 | GAGUCCCU CUGAUGAG GCCGUUAGGC CGAA ICAUCCAG | 704 | CUGGAUGC C AGGGACUC | 3483 |
| 1174 | GGAGUCCC CUGAUGAG GCCGUUAGGC CGAA IGCAUCCA | 705 | UGGAUGCC A GGGACUCC | 3484 |
| 1180 | CUGCGGGG CUGAUGAG GCCGUUAGGC CGAA IUCCCUGG | 706 | CCAGGGAC U CCCCGCAG | 3485 |
| 1182 | ACCUGCGG CUGAUGAG GCCGUUAGGC CGAA IAGUCCCU | 707 | AGGGACUC C CCGCAGGU | 3486 |
| 1183 | AACCUGCG CUGAUGAG GCCGUUAGGC CGAA IGAGUCCC | 708 | GGGACUCC C CGCAGGUU | 3487 |
| 1184 | CAACCUGC CUGAUGAG GCCGUUAGGC CGAA IGGAGUCC | 709 | GGACUCCC C GCAGGUUG | 3488 |
| 1187 | GGGCAACC CUGAUGAG GCCGUUAGGC CGAA ICGGGGAG | 710 | CUCCCCGC A GGUUGCCC | 3489 |
| 1194 | GCAGGCGG CUGAUGAG GCCGUUAGGC CGAA ICAACCUG | 711 | CAGGUUGC C CCGCCUGC | 3490 |
| 1195 | GGCAGGCG CUGAUGAG GCCGUUAGGC CGAA IGCAACCU | 712 | AGGUUGCC C CGCCUGCC | 3491 |
| 1196 | GGGCAGGC CUGAUGAG GCCGUUAGGC CGAA IGGCAACC | 713 | GGUUGCCC C GCCUGCCC | 3492 |
| 1199 | CUGGGGCA CUGAUGAG GCCGUUAGGC CGAA ICGGGGCA | 714 | UGCCCCGC C UGCCCCAG | 3493 |
| 1200 | GCUGGGGC CUGAUGAG GCCGUUAGGC CGAA IGCGGGGC | 715 | GCCCCGCC U GCCCCAGC | 3494 |
| 1203 | AGCGCUGG CUGAUGAG GCCGUUAGGC CGAA ICAGGCGG | 716 | CCGCCUGC C CCAGCGCU | 3495 |
| 1204 | UAGCGCUG CUGAUGAG GCCGUUAGGC CGAA IGCAGGCG | 717 | CGCCUGCC C CAGCGCUA | 3496 |
| 1205 | GUAGCGCU CUGAUGAG GCCGUUAGGC CGAA IGGCAGGC | 718 | GCCUGCCC C AGCGCUAC | 3497 |
| 1206 | AGUAGCGC CUGAUGAG GCCGUUAGGC CGAA IGGGCAGG | 719 | CCUGCCCC A GCGCUACU | 3498 |
| 1211 | UUGCCAGU CUGAUGAG GCCGUUAGGC CGAA ICGCUGGG | 720 | CCCAGCGC U ACUGGCAA | 3499 |
| 1214 | CAUUUGCC CUGAUGAG GCCGUUAGGC CGAA IUAGCGCU | 721 | AGCGCUAC U GGCAAAUG | 3500 |
| 1218 | GCCGCAUU CUGAUGAG GCCGUUAGGC CGAA ICCAGUAG | 722 | CUACUGGC A AAUGCGGC | 3501 |
| 1227 | GAAACAGG CUGAUGAG GCCGUUAGGC CGAA ICCGCAUU | 723 | AAUGCGGC C CCUGUUUC | 3502 |
| 1228 | AGAAACAG CUGAUGAG GCCGUUAGGC CGAA IGCCGCAU | 724 | AUGCGGCC C CUGUUUCU | 3503 |
| 1229 | CAGAAACA CUGAUGAG GCCGUUAGGC CGAA IGGCCGCA | 725 | UGCGGCCC C UGUUUCUG | 3504 |
| 1230 | CCAGAAAC CUGAUGAG GCCGUUAGGC CGAA IGGGCCGC | 726 | GCGGCCCC U GUUUCUGG | 3505 |
| 1236 | GCAGCUCC CUGAUGAG GCCGUUAGGC CGAA IAAACAGG | 727 | CCUGUUUC U GGAGCUGC | 3506 |
| 1242 | UCCCAAGC CUGAUGAG GCCGUUAGGC CGAA ICUCCAGA | 728 | UCUGGAGC U GCUUGGGA | 3507 |
| 1245 | GGUUCCCA CUGAUGAG GCCGUUAGGC CGAA ICAGCUCC | 729 | GGAGCUGC U UGGGAACC | 3508 |
| 1253 | CUGCGCGU CUGAUGAG GCCGUUAGGC CGAA IUUCCCAA | 730 | UUGGGAAC C ACGCGCAG | 3509 |
| 1254 | ACUGCGCG CUGAUGAG GCCGUUAGGC CGAA IGUUCCCA | 731 | UGGGAACC A CGCGCAGU | 3510 |
| 1260 | AGGGGCAC CUGAUGAG GCCGUUAGGC CGAA ICGCGUGG | 732 | CCACGCGC A GUGCCCCU | 3511 |
| 1265 | CCCGUAGG CUGAUGAG GCCGUUAGGC CGAA ICACUGCG | 733 | CGCAGUGC C CCUACGGG | 3512 |
| 1266 | CCCCGUAG CUGAUGAG GCCGUUAGGC CGAA IGCACUGC | 734 | GCAGUGCC C CUACGGGG | 3513 |
| 1267 | ACCCCGUA CUGAUGAG GCCGUUAGGC CGAA IGGCACUG | 735 | CAGUGCCC C UACGGGGU | 3514 |
| 1268 | CACCCCGU CUGAUGAG GCCGUUAGGC CGAA IGGGCACU | 736 | AGUGCCCC U ACGGGGUG | 3515 |
| 1278 | UCUUGAGG CUGAUGAG GCCGUUAGGC CGAA ICACCCCG | 737 | CGGGGUGC U CCUCAAGA | 3516 |
| 1280 | CGUCUUGA CUGAUGAG GCCGUUAGGC CGAA IAGCACCC | 738 | GGGUGCUC C UCAAGACG | 3517 |
| 1281 | GCGUCUUG CUGAUGAG GCCGUUAGGC CGAA IGAGCACC | 739 | GGUGCUCC U CAAGACGC | 3518 |
| 1283 | GUGCGUCU CUGAUGAG GCCGUUAGGC CGAA IAGGAGCA | 740 | UGCUCCUC A AGACGCAC | 3519 |
| 1290 | GCGGGCAG CUGAUGAG GCCGUUAGGC CGAA ICGUCUUG | 741 | CAAGACGC A CUGCCCGC | 3520 |
| 1292 | CAGCGGGC CUGAUGAG GCCGUUAGGC CGAA IUGCGUCU | 742 | AGACGCAC U GCCCGCUG | 3521 |
| 1295 | UCGCAGCG CUGAUGAG GCCGUUAGGC CGAA ICAGUGCG | 743 | CGCACUGC C CGCUGCGA | 3522 |
| 1296 | CUCGCAGC CUGAUGAG GCCGUUAGGC CGAA IGCAGUGC | 744 | GCACUGCC C GCUGCGAG | 3523 |
| 1299 | CAGCUCGC CUGAUGAG GCCGUUAGGC CGAA ICGGGCAG | 745 | CUGCCCGC U GCGAGCUG | 3524 |
| 1306 | GUGACCGC CUGAUGAG GCCGUUAGGC CGAA ICUCGCAG | 746 | CUGCGAGC U GCGGUCAC | 3525 |
| 1313 | UGCUGGGG CUGAUGAG GCCGUUAGGC CGAA IACCGCAG | 747 | CUGCGGUC A CCCCAGCA | 3526 |
| 1315 | GCUGCUGG CUGAUGAG GCCGUUAGGC CGAA IUGACCGC | 748 | GCGGUCAC C CCAGCAGC | 3527 |
| 1316 | GGCUGCUG CUGAUGAG GCCGUUAGGC CGAA IGUGACCG | 749 | CGGUCACC C CAGCAGCC | 3528 |
| 1317 | CGGCUGCU CUGAUGAG GCCGUUAGGC CGAA IGGUGACC | 750 | GGUCACCC C AGCAGCCG | 3529 |
| 1318 | CCGGCUGC CUGAUGAG GCCGUUAGGC CGAA IGGGUGAC | 751 | GUCACCCC A GCAGCCGG | 3530 |
| 1321 | ACACCGGC CUGAUGAG GCCGUUAGGC CGAA ICUGGGGU | 752 | ACCCCAGC A GCCGGUGU | 3531 |
| 1324 | CAGACACC CUGAUGAG GCCGUUAGGC CGAA ICUGCUGG | 753 | CCAGCAGC C GGUGUCUG | 3532 |
| 1331 | CCGGGCAC CUGAUGAG GCCGUUAGGC CGAA IACACCGG | 754 | CCGGUGUC U GUGCCCGG | 3533 |
| 1236 | UUCUCCCG CUGAUGAG GCCGUUAGGC CGAA ICACAGAC | 755 | GUCUGUGC C CGGGAGAA | 3534 |
| 1337 | CUUCUCCC CUGAUGAG GCCGUUAGGC CGAA IGCACAGA | 756 | UCUGUGCC C GGGAGAAG | 3535 |
| 1347 | AGCCCUGG CUGAUGAG GCCGUUAGGC CGAA ICUUCUCC | 757 | GGAGAAGC C CCAGGGCU | 3536 |
| 1348 | GAGCCCUG CUGAUGAG GCCGUUAGGC CGAA IGCUUCUC | 758 | GAGAAGCC C CAGGGCUC | 3537 |
| 1349 | AGAGCCCU CUGAUGAG GCCGUUAGGC CGAA IGGCUUCU | 759 | AGAAGCCC C AGGGCUCU | 3538 |
| 1350 | CAGAGCCC CUGAUGAG GCCGUUAGGC CGAA IGGGCUUC | 760 | GAAGCCCC A GGGCUCUG | 3539 |
| 1355 | CGCCACAG CUGAUGAG GCCGUUAGGC CGAA ICCCUGGG | 761 | CCCAGGGC U CUGUGGCG | 3540 |
| 1357 | GCCGCCAC CUGAUGAG GCCGUUAGGC CGAA IAGCCCUG | 762 | CAGGGCUC U GUGGCGGC | 3541 |
| 1366 | UCCUCGGG CUGAUGAG GCCGUUAGGC CGAA ICCGCCAC | 763 | GUGGCGGC C CCCGAGGA | 3542 |
| 1367 | CUCCUCGG CUGAUGAG GCCGUUAGGC CGAA IGCCGCCA | 764 | UGGCGGCC C CCGAGGAG | 3543 |
| 1368 | CCUCCUCG CUGAUGAG GCCGUUAGGC CGAA IGGCCGCC | 765 | GGCGGCCC C CGAGGAGG | 3544 |
| 1369 | UCCUCCUC CUGAUGAG GCCGUUAGGC CGAA IGGGCCGC | 766 | GCGGCCCC C GAGGAGGA | 3545 |
| 1382 | GGGGUCUG CUGAUGAG GCCGUUAGGC CGAA IUCCUCCU | 767 | AGGAGGAC A CAGACCCC | 3546 |
| 1384 | CGGGGGUC CUGAUGAG GCCGUUAGGC CGAA IUGUCCUC | 768 | GAGGACAC A GACCCCCG | 3547 |
| 1388 | GCGACGGG CUGAUGAG GCCGUUAGGC CGAA IUCUGUGU | 769 | ACACAGAC C CCCGUCGC | 3548 |
| 1389 | GGCGACGG CUGAUGAG GCCGUUAGGC CGAA IGUCUGUG | 770 | CACAGACC C CCGUCGCC | 3549 |
| 1390 | AGGCGACG CUGAUGAG GCCGUUAGGC CGAA IGGUCUGU | 771 | ACAGACCC C CGUCGCCU | 3550 |
| 1391 | CAGGCGAC CUGAUGAG GCCGUUAGGC CGAA IGGGUCUG | 772 | CAGACCCC C GUCGCCUG | 3551 |
| 1397 | CUGCACCA CUGAUGAG GCCGUUAGGC CGAA ICGACGGG | 773 | CCCGUCGC C UGGUGCAG | 3552 |
| 1398 | GCUGCACC CUGAUGAG GCCGUUAGGC CGAA IGCGACGG | 774 | CCGUCGCC U GGUGCAGC | 3553 |
| 1404 | GGAGCAGC CUGAUGAG GCCGUUAGGC CGAA ICACCAGG | 775 | CCUGGUGC A GCUGCUCC | 3554 |
| 1407 | GGCGGAGC CUGAUGAG GCCGUUAGGC CGAA ICUGCACC | 776 | GGUGCAGC U GCUCCGCC | 3555 |
| 1410 | GCUGGCGG CUGAUGAG GCCGUUAGGC CGAA ICAGCUGC | 777 | GCAGCUGC U CCGCCAGC | 3556 |
| 1412 | GUGCUGGC CUGAUGAG GCCGUUAGGC CGAA IAGCAGCU | 778 | AGCUGCUC C GCCAGCAC | 3557 |
| 1415 | GCUGUGCU CUGAUGAG GCCGUUAGGC CGAA ICGGAGCA | 779 | UGCUCCGC C AGCACAGC | 3558 |
| 1416 | UGCUGUGC CUGAUGAG GCCGUUAGGC CGAA IGCGGAGC | 780 | GCUCCGCC A GCACAGCA | 3559 |
| 1419 | GGCUGCUG CUGAUGAG GCCGUUAGGC CGAA ICUGGCGG | 781 | CCGCCAGC A CAGCAGCC | 3560 |
| 1421 | GGGGCUGC CUGAUGAG GCCGUUAGGC CGAA IUGCUGGC | 782 | GCCAGCAC A GCAGCCCC | 3561 |
| 1424 | CCAGGGGC CUGAUGAG GCCGUUAGGC CGAA ICUGUGCU | 783 | AGCACAGC A GCCCCUGG | 3562 |
| 1427 | CUGCCAGG CUGAUGAG GCCGUUAGGC CGAA ICUGCUGU | 784 | ACAGCAGC C CCUGGCAG | 3563 |
| 1428 | CCUGCCAG CUGAUGAG GCCGUUAGGC CGAA IGCUGCUG | 785 | CAGCAGCC C CUGGCAGG | 3564 |
| 1429 | ACCUGCCA CUGAUGAG GCCGUUAGGC CGAA IGGCUGCU | 786 | AGCAGCCC C UGGCAGGU | 3565 |
| 1430 | CACCUGCC CUGAUGAG GCCGUUAGGC CGAA IGGGCUGC | 787 | GCAGCCCC U GGCAGGUG | 3566 |
| 1434 | CGUACACC CUGAUGAG GCCGUUAGGC CGAA ICCAGGGG | 788 | CCCCUGGC A GGUGUACG | 3567 |
| 1445 | CCGCACGA CUGAUGAG GCCGUUAGGC CGAA ICOGUACA | 789 | UGUACGGC U UCGUGCGG | 3568 |
| 1456 | CGCAGGCA CUGAUGAG GCCGUUAGGC CGAA ICCCGCAC | 790 | GUGCGGGC C UGCCUGCG | 3569 |
| 1457 | GCGCAGGC CUGAUGAG GCCGUUAGGC CGAA IGCCCGCA | 791 | UGCGGGCC U GCCUGCGC | 3570 |
| 1460 | CCGGCGCA CUGAUGAG GCCGUUAGGC CGAA ICAGGCCC | 792 | GGGCCUGC C UGCGCCGG | 3571 |
| 1461 | GCCGGCGC CUGAUGAG GCCGUUAGGC CGAA IGCAGGCC | 793 | GGCCUGCC U GCGCCGGC | 3572 |
| 1466 | CACCAGCC CUGAUGAG GCCGUUAGGC CGAA ICGCAGGC | 794 | GCCUGCGC C GGCUGGUG | 3573 |
| 1470 | GGGGCACC CUGAUGAG GCCGUUAGGC CGAA ICCGGCGC | 795 | GCGCCGGC U GGUGCCCC | 3574 |
| 1476 | GGCCUGGG CUGAUGAG GCCGUUAGGC CGAA ICACCAGC | 796 | GCUGGUGC C CCCAGGCC | 3575 |
| 1477 | AGGCCUGG CUGAUGAG GCCGUUAGGC CGAA IGCACCAG | 797 | CUGGUGCC C CCAGGCCU | 3576 |
| 1478 | GAGGCCUG CUGAUGAG GCCGUUAGGC CGAA IGGCACCA | 798 | UGGUGCCC C CAGGCCUC | 3577 |
| 1479 | AGAGGCCU CUGAUGAG GCCGUUAGGC CGAA IGGGCACC | 799 | GGUGCCCC C AGGCCUCU | 3578 |
| 1480 | CAGAGGCC CUGAUGAG GCCGUUAGGC CGAA IGGGGCAC | 800 | GUGCCCCC A GGCCUCUG | 3579 |
| 1484 | GCCCCAGA CUGAUGAG GCCGUUAGGC CGAA ICCUGGGG | 801 | CCCCAGGC C UCUGGGGC | 3580 |
| 1485 | AGCCCCAG CUGAUGAG GCCGUUAGGC CGAA IGCCUGGG | 802 | CCCAGGCC U CUGGGGCU | 3581 |
| 1487 | GGAGCCCC CUGAUGAG GCCGUUAGGC CGAA IAGGCCUG | 803 | CAGGCCUC U GGGGCUCC | 3582 |
| 1493 | GUGCCUGG CUGAUGAG GCCGUUAGGC CGAA ICCCCAGA | 804 | UCUGGGGC U CCAGGCAC | 3583 |
| 1495 | UUGUGCCU CUGAUGAG GCCGUUAGGC CGAA IAGCCCCA | 805 | UGGGGCUC C AGGCACAA | 3584 |
| 1496 | GUUGUGCC CUGAUGAG GCCGUUAGGC CGAA IGAGCCCC | 806 | GGGGCUCC A GGCACAAC | 3585 |
| 1500 | GUUCGUUG CUGAUGAG GCCGUUAGGC CGAA ICCUGGAG | 807 | CUCCAGGC A CAACGAAC | 3586 |
| 1502 | GCGUUCGU CUGAUGAG GCCGUUAGGC CGAA IUGCCUGG | 808 | CCAGGCAC A ACGAACGC | 3587 |
| 1511 | GAGGAAGC CUGAUGAG GCCGUUAGGC CGAA ICGUUCGU | 809 | ACGAACGC C GCUUCCUC | 3588 |
| 1514 | CCUGAGGA CUGAUGAG GCCGUUAGGC CGAA ICGGCGUU | 810 | AACGCCGC U UCCUCAGG | 3589 |
| 1517 | GUUCCUGA CUGAUGAG GCCGUUAGGC CGAA IAAGCGGC | 811 | GCCGCUUC C UCAGGAAC | 3590 |
| 1518 | UGUUCCUG CUGAUGAG GCCGUUAGGC CGAA IGAAGCGG | 812 | CCGCUUCC U CAGGAACA | 3591 |
| 1520 | GGUGUUCC CUGAUGAG GCCGUUAGGC CGAA IAGGAAGC | 813 | GCUUCCUC A GGAACACC | 3592 |
| 1526 | CUUCUUGG CUGAUGAG GCCGUUAGGC CGAA IUUCCUGA | 814 | UCAGGAAC A CCAAGAAG | 3593 |
| 1528 | AACUUCUU CUGAUGAG GCCGUUAGGC CGAA IUGUUCCU | 815 | AGGAACAC C AAGAAGUU | 3594 |
| 1529 | GAACUUCU CUGAUGAG GCCGUUAGGC CGAA IGUGUUCC | 816 | GGAACACC A AGAAGUUC | 3595 |
| 1538 | CAGGGAGA CUGAUGAG GCCGUUAGGC CGAA IAACUUCU | 817 | AGAAGUUC A UCUCCCUG | 3596 |
| 1541 | CCCCAGGG CUGAUGAG GCCGUUAGGC CGAA IAUGAACU | 818 | AGUUCAUC U CCCUGGGG | 3597 |
| 1543 | UUCCCCAG CUGAUGAG GCCGUUAGGC CGAA IAGAUGAA | 819 | UUCAUCUC C CUGGGGAA | 3598 |
| 1544 | CUUCCCCA CUGAUGAG GCCGUUAGGC CGAA IGAGAUGA | 820 | UCAUCUCC C UGGGGAAG | 3599 |
| 1545 | GCUUCCCC CUGAUGAG GCCGUUAGGC CGAA IGGAGAUG | 821 | CAUCUCCC U GGGGAAGC | 3600 |
| 1554 | GCUUGGCA CUGAUGAG GCCGUUAGGC CGAA ICUUCCCC | 822 | GGGGAAGC A UGCCAAGC | 3601 |
| 1558 | GAGAGCUU CUGAUGAG GCCGUUAGGC CGAA ICAUGCUU | 823 | AAGCAUGC C AAGCUCUC | 3602 |
| 1559 | CGAGAGCU CUGAUGAG GCCGUUAGGC CGAA IGCAUGCU | 824 | AGCAUGCC A AGCUCUCG | 3603 |
| 1563 | GCAGCGAG CUGAUGAG GCCGUUAGGC CGAA ICUUGGCA | 825 | UGCCAAGC U CUCGCUGC | 3604 |
| 1565 | CUGCAGCG CUGAUGAG GCCGUUAGGC CGAA IAGCUUGG | 826 | CCAAGCUC U CGCUGCAG | 3605 |
| 1569 | GCUCCUGC CUGAUGAG GCCGUUAGGC CGAA ICGAGAGC | 827 | GCUCUCGC U GCAGGAGC | 3606 |
| 1572 | UCAGCUCC CUGAUGAG GCCGUUAGGC CGAA ICAGCGAG | 828 | CUCGCUGC A GGAGCUGA | 3607 |
| 1578 | UCCACGUC CUGAUGAG GCCGUUAGGC CGAA ICUCCUGC | 829 | GCAGGAGC U GACGUGGA | 3608 |
| 1604 | CCAAGCGC CUGAUGAG GCCGUUAGGC CGAA IUCCCGCA | 830 | UGCGGGAC U GCGCUUGG | 3609 |
| 1609 | CGCAGCCA CUGAUGAG GCCGUUAGGC CGAA ICGCAGUC | 831 | GACUGCGC U UGGCUGCG | 3610 |
| 1614 | UCCUGCGC CUGAUGAG GCCGUUAGGC CGAA ICCAAGCG | 832 | CGCUUGGC U GCGCAGGA | 3611 |
| 1619 | UGGGCUCC CUGAUGAG GCCGUUAGGC CGAA ICGCAGCC | 833 | GGCUGCGC A GGAGCCCA | 3612 |
| 1625 | AACCCCUG CUGAUGAG GCCGUUAGGC CGAA ICUCCUGC | 834 | GCAGGAGC C CAGGGGUU | 3613 |
| 1626 | CAACCCCU CUGAUGAG GCCGUUAGGC CGAA IGCUCCUG | 835 | CAGGAGCC C AGGGGUUG | 3614 |
| 1627 | CCAACCCC CUGAUGAG GCCGUUAGGC CGAA IGGCUCCU | 836 | AGGAGCCC A GGGGUUGG | 3615 |
| 1637 | CGGAACAC CUGAUGAG GCCGUUAGGC CGAA ICCAACCC | 837 | GGGUUGGC U GUGUUCCG | 3616 |
| 1644 | CUGCGGCC CUGAUGAG GCCGUUAGGC CGAA IAACACAG | 838 | CUGUGUUC C GGCCGCAG | 3617 |
| 1648 | UGCUCUGC CUGAUGAG GCCGUUAGGC CGAA ICCGGAAC | 839 | GUUCCGGC C GCAGAGCA | 3618 |
| 1651 | CGGUGCUC CUGAUGAG GCCGUUAGGC CGAA ICGGCCGG | 840 | CCGGCCGC A GAGCACCG | 3619 |
| 1656 | GCAGACGG CUGAUGAG GCCGUUAGGC CGAA ICUCUGCG | 841 | CGCAGAGC A CCGUCUGC | 3620 |
| 1658 | ACGCAGAC CUGAUGAG GCCGUUAGGC CGAA IUGCUCUG | 842 | CAGAGCAC C GUCUGCGU | 3621 |
| 1662 | CCUCACGC CUGAUGAG GCCGUUAGGC CGAA IACGGUGC | 843 | GCACCGUC U GCGUGAGG | 3622 |
| 1676 | CUUGGCCA CUGAUGAG GCCGUUAGGC CGAA IAUCUCCU | 844 | AGGAGAUC C UGGCCAAG | 3623 |
| 1677 | ACUUGGCC CUGAUGAG GCCGUUAGGC CGAA IGAUCUCC | 845 | GGAGAUCC U GGCCAAGU | 3624 |
| 1681 | AGGAACUU CUGAUGAG GCCGUUAGGC CGAA ICCAGGAU | 846 | AUCCUGGC C AAGUUCCU | 3625 |
| 1682 | CAGGAACU CUGAUGAG GCCGUUAGGC CGAA IGCCAGGA | 847 | UCCUGGCC A AGUUCCUG | 3626 |
| 1688 | CCAGUGCA CUGAUGAG GCCGUUAGGC CGAA IAACUUGG | 848 | CCAAGUUC C UGCACUGG | 3627 |
| 1689 | GCCAGUGC CUGAUGAG GCCGUUAGGC CGAA IGAACUUG | 849 | CAAGUUCC U GCACUGGC | 3628 |
| 1692 | UCAGCCAG CUGAUGAG GCCGUUAGGC CGAA ICAGGAAC | 850 | GUUCCUGC A CUGGCUGA | 3629 |
| 1694 | CAUCAGCC CUGAUGAG GCCGUUAGGC CGAA IUGCAGGA | 851 | UCCUGCAC U GGCUGAUG | 3630 |
| 1698 | CACUCAUC CUGAUGAG GCCGUUAGGC CGAA ICCAGUGC | 852 | GCACUGGC U GAUGAGUG | 3631 |
| 1722 | ACCUGAGC CUGAUGAG GCCGUUAGGC CGAA ICUCGACG | 853 | CGUCGAGC U GCUCAGGU | 3632 |
| 1725 | AAGACCUG CUGAUGAG GCCGUUAGGC CGAA ICAGCUCG | 854 | CGAGCUGC U CAGGUCUU | 3633 |
| 1727 | GAAAGACC CUGAUGAG GCCGUUAGGC CGAA IAGCAGCU | 855 | AGCUGCUC A GGUCUUUC | 3634 |
| 1732 | UAAAAGAA CUGAUGAG GCCGUUAGGC CGAA IACCUGAG | 856 | CUCAGGUC U UUCUUUUA | 3635 |
| 1736 | GACAUAAA CUGAUGAG GCCGUUAGGC CGAA IAAAGACC | 857 | GGUCUUUC U UUUAUGUC | 3636 |
| 1745 | GGUCUCCG CUGAUGAG GCCGUUAGGC CGAA IACAUAAA | 858 | UUUAUGUC A CGGAGACC | 3637 |
| 1753 | UGAAACGU CUGAUGAG GCCGUUAGGC CGAA IUCUCCGU | 859 | ACGGAGAC C ACGUUUCA | 3638 |
| 1754 | UUGAAACG CUGAUGAG GCCGUUAGGC CGAA IGUCUCCG | 860 | CGGAGACC A CGUUUCAA | 3639 |
| 1761 | UGUUCUUU CUGAUGAG GCCGUUAGGC CGAA IAAACGUG | 861 | CACGUUUC A AAAGAACA | 3640 |
| 1769 | AAAGAGCC CUGAUGAG GCCGUUAGGC CGAA IUUCUUUU | 862 | AAAAGAAC A GGCUCUUU | 3641 |
| 1773 | AGAAAAAG CUGAUGAG GCCGUUAGGC CGAA ICCUGUUC | 863 | GAACAGGC U CUUUUUCU | 3642 |
| 1775 | GUAGAAAA CUGAUGAG GCCGUUAGGC CGAA IAGCCUGU | 864 | ACAGGCUC U UUUUCUAC | 3643 |
| 1781 | CUUCCGGU CUGAUGAG GCCGUUAGGC CGAA IAAAAAGA | 865 | UCUUUUUC U ACCGGAAG | 3644 |
| 1784 | ACUCUUCC CUGAUGAG GCCGUUAGGC CGAA IUAGAAAA | 866 | UUUUCUAC C GGAAGAGU | 3645 |
| 1796 | CUUGCUCC CUGAUGAG GCCGUUAGGC CGAA IACACUCU | 867 | AGAGUGUC U GGAGCAAG | 3646 |
| 1802 | UUGCAACU CUGAUGAG GCCGUUAGGC CGAA ICUCCAGA | 868 | UCUGGAGC A AGUUGCAA | 3647 |
| 1809 | CAAUGCUU CUGAUGAG GCCGUUAGGC CGAA ICAACUUG | 869 | CAAGUUGC A AAGCAUUG | 3648 |
| 1814 | GAUUCCAA CUGAUGAG GCCGUUAGGC CGAA ICUUUGCA | 870 | UGCAAAGC A UUGGAAUC | 3649 |
| 1823 | GUGCUGUC CUGAUGAG GCCGUUAGGC CGAA IAUUCCAA | 871 | UUGGAAUC A GACAGCAC | 3650 |
| 1827 | UCAAGUGC CUGAUGAG GCCGUUAGGC CGAA IUCUGAUU | 872 | AAUCAGAC A GCACUUGA | 3651 |
| 1830 | UCUUCAAG CUGAUGAG GCCGUUAGGC CGAA ICUGUCUG | 873 | CAGACAGC A CUUGAAGA | 3652 |
| 1832 | CCUCUUCA CUGAUGAG GCCGUUAGGC CGAA IUGCUGUC | 874 | GACAGCAC U UGAAGAGG | 3653 |
| 1845 | CCCGCAGC CUGAUGAG GCCGUUAGGC CGAA ICACCCUC | 875 | GAGGGUGC A GCUGCGGG | 3654 |
| 1848 | GCUCCCGC CUGAUGAG GCCGUUAGGC CGAA ICUGCACC | 876 | GGUGCAGC U GCGGGAGC | 3655 |
| 1857 | CUUCCGAC CUGAUGAG GCCGUUAGGC CGAA ICUCCCGC | 877 | GCGGGAGC U GUCGGAAG | 3656 |
| 1867 | CUGACCUC CUGAUGAG GCCGUUAGGC CGAA ICUUCCGA | 878 | UCGGAAGC A GAGGUCAG | 3657 |
| 1874 | AUGCUGCC CUGAUGAG GCCGUUAGGC CGAA IACCUCUG | 879 | CAGAGGUC A GGCAGCAU | 3658 |
| 1878 | CCCGAUGC CUGAUGAG GCCGUUAGGC CGAA ICCUGACC | 880 | GGUCAGGC A GCAUCGGG | 3659 |
| 1881 | CUUCCCGA CUGAUGAG GCCGUUAGGC CGAA ICUGCCUG | 881 | CAGGCAGC A UCGGGAAG | 3660 |
| 1891 | GCGGGCCU CUGAUGAG GCCGUUAGGC CGAA ICUUCCCG | 882 | CGGGAAGC C AGGCCCGC | 3661 |
| 1892 | GGCGGGCC CUGAUGAG GCCGUUAGGC CGAA IGCUUCCC | 883 | GGGAAGCC A GGCCCGCC | 3662 |
| 1896 | GCAGGGCG CUGAUGAG GCCGUUAGGC CGAA ICCUGGCU | 884 | AGCCAGGC C CGCCCUGC | 3663 |
| 1897 | AGCAGGGC CUGAUGAG GCCGUUAGGC CGAA IGCCUGGC | 885 | GCCAGGCC C GCCCUGCU | 3664 |
| 1900 | GUCAGCAG CUGAUGAG GCCGUUAGGC CGAA ICGGGCCU | 886 | AGGCCCGC C CUGCUGAC | 3665 |
| 1901 | CGUCAGCA CUGAUGAG GCCGUUAGGC CGAA IGCGGGCC | 887 | GGCCCGCC C UGCUGACG | 3666 |
| 1902 | ACGUCAGC CUGAUGAG GCCGUUAGGC CGAA IGGCGGGC | 888 | GCCCGCCC U GCUGACGU | 3667 |
| 1905 | UGGACGUC CUGAUGAG GCCGUUAGGC CGAA ICAGGGCG | 889 | CGCCCUGC U GACGUCCA | 3668 |
| 1912 | CGGAGUCU CUGAUGAG GCCGUUAGGC CGAA IACGUCAG | 890 | CUGACGUC C AGACUCCG | 3669 |
| 1913 | GCGGAGUC CUGAUGAG GCCGUUAGGC CGAA IGACGUCA | 891 | UGACGUCC A GACUCCGC | 3670 |
| 1917 | UGAAGCGG CUGAUGAG GCCGUUAGGC CGAA IUCUGGAC | 892 | GUCCAGAC U CCGCUUCA | 3671 |
| 1919 | GAUGAAGC CUGAUGAG GCCGUUAGGC CGAA IAGUCUGG | 893 | CCAGACUC C GCUUCAUC | 3672 |
| 1922 | GGGGAUGA CUGAUGAG GCCGUUAGGC CGAA ICGGAGUC | 894 | GACUCCGC U UCAUCCCC | 3673 |
| 1925 | CUUGGGGA CUGAUGAG GCCGUUAGGC CGAA IAAGCGGA | 895 | UCCGCUUC A UCCCCAAG | 3674 |
| 1928 | AGGCUUGG CUGAUGAG GCCGUUAGGC CGAA IAUGAAGC | 896 | GCUUCAUC C CCAAGCCU | 3675 |
| 1929 | CAGGCUUG CUGAUGAG GCCGUUAGGC CGAA IGAUGAAG | 897 | CUUCAUCC C CAAGCCUG | 3676 |
| 1930 | UCAGGCUU CUGAUGAG GCCGUUAGGC CGAA IGGAUGAA | 898 | UUCAUCCC C AAGCCUGA | 3677 |
| 1931 | GUCAGGCU CUGAUGAG GCCGUUAGGC CGAA IGGGAUGA | 899 | UCAUCCCC A AGCCUGAC | 3678 |
| 1935 | GCCCGUCA CUGAUGAG GCCGUUAGGC CGAA ICUUGGGG | 900 | CCCCAAGC C UGACGGGC | 3679 |
| 1936 | AGCCCGUC CUGAUGAG GCCGUUAGGC CGAA IGCUUGGG | 901 | CCCAAGCC U GACGGGCU | 3680 |
| 1944 | UCGGCCGC CUGAUGAG GCCGUUAGGC CGAA ICCCGUCA | 902 | UGACGGGC U GCGGCCGA | 3681 |
| 1950 | UCACAAUC CUGAUGAG GCCGUUAGGC CGAA ICCGCAGC | 903 | GCUGCGGC C GAUUGUGA | 3682 |
| 1961 | GUAGUCCA CUGAUGAG GCCGUUAGGC CGAA IUUCACAA | 904 | UUGUGAAC A UGGACUAC | 3683 |
| 1967 | CACGACGU CUGAUGAG GCCGUUAGGC CGAA IUCCAUGU | 905 | ACAUGGAC U ACGUCGUG | 3684 |
| 1981 | AACGUUCU CUGAUGAG GCCGUUAGGC CGAA ICUCCCAC | 906 | GUGGGAGC C AGAACGUU | 3685 |
| 1982 | GAACGUUC CUGAUGAG GCCGUUAGGC CGAA IGCUCCCA | 907 | UGGGAGCC A GAACGUUC | 3686 |
| 1991 | UUCUCUGC CUGAUGAG GCCGUUAGGC CGAA IAACGUUC | 908 | GAACGUUC C GCAGAGAA | 3687 |
| 1994 | CUUUUCUC CUGAUGAG GCCGUUAGGC CGAA ICGGAACG | 909 | CGUUCCGC A GAGAAAAG | 3688 |
| 2008 | AGACGCUC CUGAUGAG GCCGUUAGGC CGAA ICCCUCUU | 910 | AAGAGGGC C GAGCGUCU | 3689 |
| 2016 | UCGAGGUG CUGAUGAG GCCGUUAGGC CGAA IACGCUCG | 911 | CGAGCGUC U CACCUCGA | 3690 |
| 2018 | CCUCGAGG CUGAUGAG GCCGUUAGGC CGAA IAGACGCU | 912 | AGCGUCUC A CCUCGAGG | 3691 |
| 2020 | ACCCUCGA CUGAUGAG GCCGUUAGGC CGAA IUGAGACG | 913 | CGUCUCAC C UCGAGGGU | 3692 |
| 2021 | CACCCUCG CUGAUGAG GCCGUUAGGC CGAA IGUGAGAC | 914 | GUCUCACC U CGAGGGUG | 3693 |
| 2035 | CUGAACAG CUGAUGAG GCCGUUAGGC CGAA ICCUUCAC | 915 | GUGAAGGC A CUGUUCAG | 3694 |
| 2037 | CGCUGAAC CUGAUGAG GCCGUUAGGC CGAA IUGCCUUC | 916 | GAAGGCAC U GUUCAGCG | 3695 |
| 2042 | GAGCACGC CUGAUGAG GCCGUUAGGC CGAA IAACAGUG | 917 | CACUGUUC A GCGUGCUC | 3696 |
| 2049 | CGUAGUUG CUGAUGAG GCCGUUAGGC CGAA ICACGCUG | 918 | CAGCGUGC U CAACUACG | 3697 |
| 2051 | CUCGUAGU CUGAUGAG GCCGUUAGGC CGAA IAGCACGC | 919 | GCGUGCUC A ACUACGAG | 3698 |
| 2054 | CCGCUCGU CUGAUGAG GCCGUUAGGC CGAA IUUGAGCA | 920 | UGCUCAAC U ACGAGCGG | 3699 |
| 2072 | GAGGCCGG CUGAUGAG GCCGUUAGGC CGAA ICGCCGCG | 921 | CGCGGCGC C CCGGCCUC | 3700 |
| 2073 | GGAGGCCG CUGAUGAG GCCGUUAGGC CGAA IGCGCCGC | 922 | GCGGCGCC C CGGCCUCC | 3701 |
| 2074 | AGGAGGCC CUGAUGAG GCCGUUAGGC CGAA IGGCGCCG | 923 | CGGCGCCC C GGCCUCCU | 3702 |
| 2078 | GCCCAGGA CUGAUGAG GCCGUUAGGC CGAA ICCGGGGC | 924 | GCCCCGGC C UCCUGGGC | 3703 |
| 2079 | CGCCCAGG CUGAUGAG GCCGUUAGGC CGAA IGCCGGGG | 925 | CCCCGGCC U CCUGGGCG | 3704 |
| 2081 | GGCGCCCA CUGAUGAG GCCGUUAGGC CGAA IAGGCCGG | 926 | CCGGCCUC C UGGGCGCC | 3705 |
| 2082 | AGGCGCCC CUGAUGAG GCCGUUAGGC CGAA IGAGGCCG | 927 | CGGCCUCC U GGGCGCCU | 3706 |
| 2089 | AGCACAGA CUGAUGAG GCCGUUAGGC CGAA ICGCCCAG | 928 | CUGGGCGC C UCUGUGCU | 3707 |
| 2090 | CAGCACAG CUGAUGAG GCCGUUAGGC CGAA IGCGCCCA | 929 | UGGGCGCC U CUGUGCUG | 3708 |
| 2092 | CCCAGCAC CUGAUGAG GCCGUUAGGC CGAA IAGGCGCC | 930 | GGCGCCUC U GUGCUGGG | 3709 |
| 2097 | CCAGGCCC CUGAUGAG GCCGUUAGGC CGAA ICACAGAG | 931 | CUCUGUGC U GGGCCUGG | 3710 |
| 2102 | AUCGUCCA CUGAUGAG GCCGUUAGGC CGAA ICCCAGCA | 932 | UGCUGGGC C UGGACGAU | 3711 |
| 2103 | UAUCGUCC CUGAUGAG GCCGUUAGGC CGAA IGCCCAGC | 933 | GCUGGGCC U GGACGAUA | 3712 |
| 2114 | GGCCCUGU CUGAUGAG GCCGUUAGGC CGAA IAUAUCGU | 934 | ACGAUAUC C ACAGGGCC | 3713 |
| 2115 | AGGCCCUG CUGAUGAG GCCGUUAGGC CGAA IGAUAUCG | 935 | CGAUAUCC A CAGGGCCU | 3714 |
| 2117 | CCAGGCCC CUGAUGAG GCCGUUAGGC CGAA IUGGAUAU | 936 | AUAUCCAC A GGGCCUGG | 3715 |
| 2122 | GUGCGCCA CUGAUGAG GCCGUUAGGC CGAA ICCCUGUG | 937 | CACAGGGC C UGGCGCAC | 3716 |
| 2123 | GGUGCGCC CUGAUGAG GCCGUUAGGC CGAA IGCCCUGU | 938 | ACAGGGCC U GGCGCACC | 3717 |
| 2129 | CACGAAGG CUGAUGAG GCCGUUAGGC CGAA ICGCCAGG | 939 | CCUGGCGC A CCUUCGUG | 3718 |
| 2131 | AGCACGAA CUGAUGAG GCCGUUAGGC CGAA IUGCGCCA | 940 | UGGCGCAC C UUCGUGCU | 3719 |
| 2132 | CAGCACGA CUGAUGAG GCCGUUAGGC CGAA IGUGCGCC | 941 | GGCGCACC U UCGUGCUG | 3720 |
| 2139 | GCACACGC CUGAUGAG GCCGUUAGGC CGAA ICACGAAG | 942 | CUUCGUGC U GCGUGUGC | 3721 |
| 2152 | GGGUCCUG CUGAUGAG GCCGUUAGGC CGAA ICCCGCAC | 943 | GUGCGGGC C CAGGACCC | 3722 |
| 2153 | CGGGUCCU CUGAUGAG GCCGUUAGGC CGAA IGCCCGCA | 944 | UGCGGGCC C AGGACCCG | 3723 |
| 2154 | GCGGGUCC CUGAUGAG GCCGUUAGGC CGAA IGGCCCGC | 945 | GCGGGCCC A GGACCCGC | 3724 |
| 2159 | AGGCGGCG CUGAUGAG GCCGUUAGGC CGAA IUCCUGGG | 946 | CCCAGGAC C CGCCGCCU | 3725 |
| 2160 | CAGGCGGC CUGAUGAG GCCGUUAGGC CGAA IGUCCUGG | 947 | CCAGGACC C GCCGCCUG | 3726 |
| 2163 | GCUCAGGC CUGAUGAG GCCGUUAGGC CGAA ICGGGUCC | 948 | GGACCCGC C GCCUGAGC | 3727 |
| 2166 | ACAGCUCA CUGAUGAG GCCGUUAGGC CGAA ICGGCGGG | 949 | CCCGCCGC C UGAGCUGU | 3728 |
| 2167 | UACAGCUC CUGAUGAG GCCGUUAGGC CGAA IGCGGCGG | 950 | CCGCCGCC U GAGCUGUA | 3729 |
| 2172 | CAAAGUAC CUGAUGAG GCCGUUAGGC CGAA ICUCAGGC | 951 | GCCUGAGC U GUACUUUG | 3730 |
| 2177 | CUUGACAA CUGAUGAG GCCGUUAGGC CGAA IUACAGCU | 952 | AGCUGUAC U UUGUCAAG | 3731 |
| 2183 | AUCCACCU CUGAUGAG GCCGUUAGGC CGAA IACAAAGU | 953 | ACUUUGUC A AGGUGGAU | 3732 |
| 2210 | GGGGAUGG CUGAUGAG GCCGUUAGGC CGAA IUCGUACG | 954 | CGUACGAC A CCAUCCCC | 3733 |
| 2212 | UGGGGGAU CUGAUGAG GCCGUUAGGC CGAA IUGUCGUA | 955 | UACGACAC C AUCCCCCA | 3734 |
| 2213 | CUGGGGGA CUGAUGAG GCCGUUAGGC CGAA IGUGUCGU | 956 | ACGACACC A UCCCCCAG | 3735 |
| 2216 | GUCCUGGG CUGAUGAG GCCGUUAGGC CGAA IAUGGUGU | 957 | ACACCAUC C CCCAGGAC | 3736 |
| 2217 | UGUCCUGG CUGAUGAG GCCGUUAGGC CGAA IGAUGGUG | 958 | CACCAUCC C CCAGGACA | 3737 |
| 2218 | CUGUCCUG CUGAUGAG GCCGUUAGGC CGAA IGGAUGGU | 959 | ACCAUCCC C CAGGACAG | 3738 |
| 2219 | CCUGUCCU CUGAUGAG GCCGUUAGGC CGAA IGGGAUGG | 960 | CCAUCCCC C AGGACAGG | 3739 |
| 2220 | GCCUGUCC CUGAUGAG GCCGUUAGGC CGAA IGGGGAUG | 961 | CAUCCCCC A GGACAGGC | 3740 |
| 2225 | CGUGAGCC CUGAUGAG GCCGUUAGGC CGAA IUCCUGGG | 962 | CCCAGGAC A GGCUCACG | 3741 |
| 2229 | CCUCCGUG CUGAUGAG GCCGUUAGGC CGAA ICCUGUCC | 963 | GGACAGGC U CACGGAGG | 3742 |
| 2231 | GACCUCCG CUGAUGAG GCCGUUAGGC CGAA IAGCCUGU | 964 | ACAGGCUC A CGGAGGUC | 3743 |
| 2240 | GCUGGCGA CUGAUGAG GCCGUUAGGC CGAA IACCUCCG | 965 | CGGAGGUC A UCGCCAGC | 3744 |
| 2245 | AUGAUGCU CUGAUGAG GCCGUUAGGC CGAA ICGAUGAC | 966 | GUCAUCGC C AGCAUCAU | 3745 |
| 2246 | GAUGAUGC CUGAUGAG GCCGUUAGGC CGAA IGCGAUGA | 967 | UCAUCGCC A GCAUCAUC | 3746 |
| 2249 | UUUGAUGA CUGAUGAG GCCGUUAGGC CGAA ICUGGCGA | 968 | UCGCCAGC A UCAUCAAA | 3747 |
| 2252 | GGGUUUGA CUGAUGAG GCCGUUAGGC CGAA IAUGCUGG | 969 | CCAGCAUC A UCAAACCC | 3748 |
| 2255 | CUGGGGUU CUGAUGAG GCCGUUAGGC CGAA IAUGAUGC | 970 | GCAUCAUC A AACCCCAG | 3749 |
| 2259 | UGUUCUGG CUGAUGAG GCCGUUAGGC CGAA IUUUGAUG | 971 | CAUCAAAC C CCAGAACA | 3750 |
| 2260 | GUGUUCUG CUGAUGAG GCCGUUAGGC CGAA IGUUUGAU | 972 | AUCAAACC C CAGAACAC | 3751 |
| 2261 | CGUGUUCU CUGAUGAG GCCGUUAGGC CGAA IGGUUUGA | 973 | UCAAACCC C AGAACACG | 3752 |
| 2262 | ACGUGUUC CUGAUGAG GCCGUUAGGC CGAA IGGGUUUG | 974 | CAAACCCC A GAACACGU | 3753 |
| 2267 | GCAGUACG CUGAUGAG GCCGUUAGGC CGAA IUUCUGGG | 975 | CCCAGAAC A CGUACUGC | 3754 |
| 2273 | ACGCACGC CUGAUGAG GCCGUUAGGC CGAA IUACGUGU | 976 | ACACGUAC U GCGUGCGU | 3755 |
| 2290 | UGGACCAC CUGAUGAG GCCGUUAGGC CGAA ICAUACCG | 977 | CGGUAUGC C GUGGUCCA | 3756 |
| 2297 | GGCCUUCU CUGAUGAG GCCGUUAGGC CGAA IACCACGG | 978 | CCGUGGUC C AGAAGGCC | 3757 |
| 2298 | CGGCCUUC CUGAUGAG GCCGUUAGGC CGAA IGACCACG | 979 | CGUGGUCC A GAAGGCCG | 3758 |
| 2305 | CCAUGGGC CUGAUGAG GCCGUUAGGC CGAA ICCUUCUG | 980 | CAGAAGGC C GCCCAUGG | 3759 |
| 2308 | UGCCCAUG CUGAUGAG GCCGUUAGGC CGAA ICGGCCUU | 981 | AAGGCCGC C CAUGGGCA | 3760 |
| 2309 | GUGCCCAU CUGAUGAG GCCGUUAGGC CGAA IGCGGCCU | 982 | AGGCCGCC C AUGGGCAC | 3761 |
| 2310 | CGUGCCCA CUGAUGAG GCCGUUAGGC CGAA IGGCGGCC | 983 | GGCCGCCC A UGGGCACG | 3762 |
| 2316 | UGCGGACG CUGAUGAG GCCGUUAGGC CGAA ICCCAUGG | 984 | CCAUGGGC A CGUCCGCA | 3763 |
| 2321 | GGCCUUGC CUGAUGAG GCCGUUAGGC CGAA IACGUGCC | 985 | GGCACGUC C GCAAGGCC | 3764 |
| 2324 | GAAGGCCU CUGAUGAG GCCGUUAGGC CGAA ICGGACGU | 986 | ACGUCCGC A AGGCCUUC | 3765 |
| 2329 | CUCUUGAA CUGAUGAG GCCGUUAGGC CGAA ICCUUGCG | 987 | CGCAAGGC C UUCAAGAG | 3766 |
| 2330 | GCUCUUGA CUGAUGAG GCCGUUAGGC CGAA IGCCUUGC | 988 | GCAAGGCC U UCAAGAGC | 3767 |
| 2333 | GUGGCUCU CUGAUGAG GCCGUUAGGC CGAA IAAGGCCU | 989 | AGGCCUUC A AGAGCCAC | 3768 |
| 2339 | AGAGACGU CUGAUGAG GCCGUUAGGC CGAA ICUCUUGA | 990 | UCAAGAGC C ACGUCUCU | 3769 |
| 2340 | UAGAGACG CUGAUGAG GCCGUUAGGC CGAA IGCUCUUG | 991 | CAAGAGCC A CGUCUCUA | 3770 |
| 2345 | CAAGGUAG CUGAUGAG GCCGUUAGGC CGAA IACGUGGC | 992 | GCCACGUC U CUACCUUG | 3771 |
| 2347 | GUCAAGGU CUGAUGAG GCCGUUAGGC CGAA IAGACGUG | 993 | CAGGUCUC U ACCUUGAC | 3772 |
| 2350 | UCUGUCAA CUGAUGAG GCCGUUAGGC CGAA IUAGAGAC | 994 | GUCUCUAC C UUGACAGA | 3773 |
| 2351 | GUCUGUCA CUGAUGAG GCCGUUAGGC CGAA IGUAGAGA | 995 | UCUCUACC U UGACAGAC | 3774 |
| 2356 | UGGAGGUC CUGAUGAG GCCGUUAGGC CGAA IUCAAGGU | 996 | ACCUUGAC A GACCUCCA | 3775 |
| 2360 | CGGCUGGA CUGAUGAG GCCGUUAGGC CGAA IUCUGUCA | 997 | UGACAGAC C UCCAGCCG | 3776 |
| 2361 | ACGGCUGG CUGAUGAG GCCGUUAGGC CGAA IGUCUGUC | 998 | GACAGACC U CCAGCCGU | 3777 |
| 2363 | GUACGGCU CUGAUGAG GCCGUUAGGC CGAA IAGGUCUG | 999 | CAGACCUC C AGCCGUAC | 3778 |
| 2364 | UGUACGGC CUGAUGAG GCCGUUAGGC CGAA IGAGGUCU | 1000 | AGACCUCC A GCCGUACA | 3779 |
| 2367 | GCAUGUAC CUGAUGAG GCCGUUAGGC CGAA ICUGGAGG | 1001 | CCUCCAGC C GUACAUGC | 3780 |
| 2372 | CUGUCGCA CUGAUGAG GCCGUUAGGC CGAA IUACGGCU | 1002 | AGCCGUAC A UGCGACAG | 3781 |
| 2379 | CCACGAAC CUGAUGAG GCCGUUAGGC CGAA IUCGCAUG | 1003 | CAUGCGAC A GUUCGUGG | 3782 |
| 2389 | UGCAGGUG CUGAUGAG GCCGUUAGGC CGAA ICCACGAA | 1004 | UUCGUGGC U CACCUGCA | 3783 |
| 2391 | CCUGCAGG CUGAUGAG GCCGUUAGGC CGAA IAGCCACG | 1005 | CGUGGCUC A CCUGCAGG | 3784 |
| 2393 | CUCCUGCA CUGAUGAG GCCGUUAGGC CGAA IUGAGCCA | 1006 | UGGCUCAC C UGCAGGAG | 3785 |
| 2394 | UCUCCUGC CUGAUGAG GCCGUUAGGC CGAA IGUGAGCC | 1007 | GGCUCACC U GCAGGAGA | 3786 |
| 2397 | UGGUCUCC CUGAUGAG GCCGUUAGGC CGAA ICAGGUGA | 1008 | UCACCUGC A GGAGACCA | 3787 |
| 2404 | AGCGGGCU CUGAUGAG GCCGUUAGGC CGAA IUCUCCUG | 1009 | CAGGAGAC C AGCCCGCU | 3788 |
| 2405 | CAGCGGGC CUGAUGAG GCCGUUAGGC CGAA IGUCUCCU | 1010 | AGGAGACC A GCCCGCUG | 3789 |
| 2408 | CCUCAGCG CUGAUGAG GCCGUUAGGC CGAA ICUGGUCU | 1011 | AGACCAGC C CGCUGAGG | 3790 |
| 2409 | CCCUCAGC CUGAUGAG GCCGUUAGGC CGAA IGCUGGUC | 1012 | GACCAGCC C GCUGAGGG | 3791 |
| 2412 | CAUCCCUC CUGAUGAG GCCGUUAGGC CGAA ICGGGCUG | 1013 | CAGCCCGC U GAGGGAUG | 3792 |
| 2422 | AUGACGAC CUGAUGAG GCCGUUAGGC CGAA ICAUCCCU | 1014 | AGGGAUGC C GUCGUCAU | 3793 |
| 2429 | CUGCUCGA CUGAUGAG GCCGUUAGGC CGAA IACGACGG | 1015 | CCGUCGUC A UCGAGCAG | 3794 |
| 2436 | AGGAGCUC CUGAUGAG GCCGUUAGGC CGAA ICUCGAUG | 1016 | CAUCGAGC A GAGCUCCU | 3795 |
| 2441 | CAGGGAGG CUGAUGAG GCCGUUAGGC CGAA ICUCUGCU | 1017 | AGCAGAGC U CCUCCCUG | 3796 |
| 2443 | UUCAGGGA CUGAUGAG GCCGUUAGGC CGAA IAGCUCUG | 1018 | CAGAGCUC C UCCCUGAA | 3797 |
| 2444 | AUUCAGGG CUGAUGAG GCCGUUAGGC CGAA IGAGCUCU | 1019 | AGAGCUCC U CCCUGAAU | 3798 |
| 2446 | UCAUUCAG CUGAUGAG GCCGUUAGGC CGAA IAGGAGCU | 1020 | AGCUCCUC C CUGAAUGA | 3799 |
| 2447 | CUCAUUCA CUGAUGAG GCCGUUAGGC CGAA IGAGGAGC | 1021 | GCUCCUCC C UGAAUGAG | 3800 |
| 2448 | CCUCAUUC CUGAUGAG GCCGUUAGGC CGAA IGGAGGAG | 1022 | CUCCUCCC U GAAUGAGG | 3801 |
| 2458 | CCACUGCU CUGAUGAG GCCGUUAGGC CGAA ICCUCAUU | 1023 | AAUGAGGC C AGCAGUGG | 3802 |
| 2459 | GCCACUGC CUGAUGAG GCCGUUAGGC CGAA IGCCUCAU | 1024 | AUGAGGCC A GCAGUGGC | 3803 |
| 2462 | GAGGCCAC CUGAUGAG GCCGUUAGGC CGAA ICUGGCCU | 1025 | AGGCCAGC A GUGGCCUC | 3804 |
| 2468 | GUCGAAGA CUGAUGAG GCCGUUAGGC CGAA ICCACUGC | 1026 | GCAGUGGC C UCUUCGAC | 3805 |
| 2469 | CGUCGAAG CUGAUGAG GCCGUUAGGC CGAA IGCCACUG | 1027 | CAGUGGCC U CUUCGACG | 3806 |
| 2471 | GACGUCGA CUGAUGAG GCCGUUAGGC CGAA IAGGCCAC | 1028 | GUGGCCUC U UCGACGUC | 3807 |
| 2480 | GCGUAGGA CUGAUGAG GCCGUUAGGC CGAA IACGUCGA | 1029 | UCGACGUC U UCCUACGC | 3808 |
| 2483 | GAAGCGUA CUGAUGAG GCCGUUAGGC CGAA IAAGACGU | 1030 | ACGUCUUC C UACGCUUC | 3809 |
| 2484 | UGAAGCGU CUGAUGAG GCCGUUAGGC CGAA IGAAGACG | 1031 | CGUCUUCC U ACGCUUCA | 3810 |
| 2489 | GCACAUGA CUGAUGAG GCCGUUAGGC CGAA ICGUAGGA | 1032 | UCCUACGC U UCAUGUGC | 3811 |
| 2492 | GUGGCACA CUGAUGAG GCCGUUAGGC CGAA IAAGCGUA | 1033 | UACGCUUC A UGUGCCAC | 3812 |
| 2498 | GGCGUGGU CUGAUGAG GCCGUUAGGC CGAA ICACAUGA | 1034 | UCAUGUGC C ACCACGCC | 3813 |
| 2499 | CGGCGUGG CUGAUGAG GCCGUUAGGC CGAA IGCACAUG | 1035 | CAUGUGCC A CCACGCCG | 3814 |
| 2501 | CACGGCGU CUGAUGAG GCCGUUAGGC CGAA IUGGCACA | 1036 | UGUGCCAC C ACGCCGUG | 3815 |
| 2502 | GCACGGCG CUGAUGAG GCCGUUAGGC CGAA IGUGGCAC | 1037 | GUGCCACC A CGCCGUGC | 3816 |
| 2506 | AUGCGCAC CUGAUGAG GCCGUUAGGC CGAA ICGUGGUG | 1038 | CACCACGC C GUGCGCAU | 3817 |
| 2513 | GCCCCUGA CUGAUGAG GCCGUUAGGC CGAA ICGCACGG | 1039 | CCGUGCGC A UCAGGGGC | 3818 |
| 2516 | CUUGCCCC CUGAUGAG GCCGUUAGGC CGAA IAUGCGCA | 1040 | UGCGCAUC A GGGGCAAG | 3819 |
| 2522 | GUAGGACU CUGAUGAG GCCGUUAGGC CGAA ICCCCUGA | 1041 | UCAGGGGC A AGUCCUAC | 3820 |
| 2527 | UGGACGUA CUGAUGAG GCCGUUAGGC CGAA IACUUGCC | 1042 | GGCAAGUC C UACGUCCA | 3821 |
| 2528 | CUGGACGU CUGAUGAG GCCGUUAGGC CGAA IGACUUGC | 1043 | GCAAGUCC U ACGUCCAG | 3822 |
| 2534 | CUGGCACU CUGAUGAG GCCGUUAGGC CGAA IACGUAGG | 1044 | CCUACGUC C AGUGCCAG | 3823 |
| 2535 | CCUGGCAC CUGAUGAG GCCGUUAGGC CGAA IGACGUAG | 1045 | CUACGUCC A GUGCCAGG | 3824 |
| 2540 | GAUCCCCU CUGAUGAG GCCGUUAGGC CGAA ICACUGGA | 1046 | UCCAGUGC C AGGGGAUC | 3825 |
| 2541 | GGAUCCCC CUGAUGAG GCCGUUAGGC CGAA IGCACUGG | 1047 | CCAGUGCC A GGGGAUCC | 3826 |
| 2549 | GCCCUGCG CUGAUGAG GCCGUUAGGC CGAA IAUCCCCU | 1048 | AGGGGAUC C CGCAGGGC | 3827 |
| 2550 | AGCCCUGC CUGAUGAG GCCGUUAGGC CGAA IGAUCCCC | 1049 | GGGGAUCC C GCAGGGCU | 3828 |
| 2553 | UGGAGCCC CUGAUGAG GCCGUUAGGC CGAA ICGGGAUC | 1050 | GAUCCCGC A GGGCUCCA | 3829 |
| 2558 | GAGGAUGG CUGAUGAG GCCGUUAGGC CGAA ICCCUGCG | 1051 | CGCAGGGC U CCAUCCUC | 3830 |
| 2560 | GAGAGGAU CUGAUGAG GCCGUUAGGC CGAA IAGCCCUG | 1052 | CAGGGCUC C AUCCUCUC | 3831 |
| 2561 | GGAGAGGA CUGAUGAG GCCGUUAGGC CGAA IGAGCCCU | 1053 | AGGGCUCC A UCCUCUCC | 3832 |
| 2564 | CGUGGAGA CUGAUGAG GCCGUUAGGC CGAA IAUGGAGC | 1054 | GCUCCAUC C UCUCCACG | 3833 |
| 2565 | GCGUGGAG CUGAUGAG GCCGUUAGGC CGAA IGAUGGAG | 1055 | CUCCAUCC U CUCCACGC | 3834 |
| 2567 | CAGCGUGG CUGAUGAG GCCGUUAGGC CGAA IAGGAUGG | 1056 | CCAUCCUC U CCACGCUG | 3835 |
| 2569 | AGCAGCGU CUGAUGAG GCCGUUAGGC CGAA IAGAGGAU | 1057 | AUCCUCUC C ACGCUGCU | 3836 |
| 2570 | GAGCAGCG CUGAUGAG GCCGUUAGGC CGAA IGAGAGGA | 1058 | UCCUCUCC A CGCUGCUC | 3837 |
| 2574 | UGCAGAGC CUGAUGAG GCCGUUAGGC CGAA ICGUGGAG | 1059 | CUCCACGC U GCUCUGCA | 3838 |
| 2577 | GGCUGCAG CUGAUGAG GCCGUUAGGC CGAA ICAGCGUG | 1060 | CACGCUGC U CUGCAGCC | 3839 |
| 2579 | CAGGCUGC CUGAUGAG GCCGUUAGGC CGAA IAGCAGCG | 1061 | CGCUGCUC U GCAGCCUG | 3840 |
| 2582 | GCACAGGC CUGAUGAG GCCGUUAGGC CGAA ICAGAGCA | 1062 | UGCUCUGC A GCCUGUGC | 3841 |
| 2585 | GUAGCACA CUGAUGAG GCCGUUAGGC CGAA ICUGCAGA | 1063 | UCUGCAGC C UGUGCUAC | 3842 |
| 2586 | CGUAGCAC CUGAUGAG GCCGUUAGGC CGAA IGCUGCAG | 1064 | CUGCAGCC U GUGCUACG | 3843 |
| 2591 | GUCGCCGU CUGAUGAG GCCGUUAGGC CGAA ICACAGGC | 1065 | GCCUGUGC U ACGGCGAC | 3844 |
| 2600 | GUUCUCCA CUGAUGAG GCCGUUAGGC CGAA IUCGCCGU | 1066 | ACGGCGAC A UGGAGAAC | 3845 |
| 2609 | AAACAGCU CUGAUGAG GCCGUUAGGC CGAA IUUCUCCA | 1067 | UGGAGAAC A AGCUGUUU | 3846 |
| 2613 | CCGCAAAC CUGAUGAG GCCGUUAGGC CGAA ICUUGUUC | 1068 | GAACAAGC U GUUUGCGG | 3847 |
| 2640 | GCAGGAGC CUGAUGAG GCCGUUAGGC CGAA ICCCGUCC | 1069 | GGACGGGC U GCUCCUGC | 3848 |
| 2643 | AACGCAGG CUGAUGAG GCCGUUAGGC CGAA ICAGCCCG | 1070 | CGGGCUGC U CCUGCGUU | 3849 |
| 2645 | CAAACGCA CUGAUGAG GCCGUUAGGC CGAA IAGCAGCC | 1071 | GGCUGCUC C UGCGUUUG | 3850 |
| 2646 | CCAAACGC CUGAUGAG GCCGUUAGGC CGAA IGAGCAGC | 1072 | GCUGCUCC U GCGUUUGG | 3851 |
| 2666 | CACCAACA CUGAUGAG GCCGUUAGGC CGAA IAAAUCAU | 1073 | AUGAUUUC U UGUUGGUG | 3852 |
| 2677 | AGGUGAGG CUGAUGAG GCCGUUAGGC CGAA IUCACCAA | 1074 | UUGGUGAC A CCUCACCU | 3853 |
| 2679 | UGAGGUGA CUGAUGAG GCCGUUAGGC CGAA IUGUCACC | 1075 | GGUGACAC C UCACCUCA | 3854 |
| 2680 | GUGAGGUG CUGAUGAG GCCGUUAGGC CGAA IGUGUCAC | 1076 | GUGACACC U CACCUCAC | 3855 |
| 2682 | GGGUGAGG CUGAUGAG GCCGUUAGGC CGAA IAGGUGUC | 1077 | GACACCUC A CCUCACCC | 3856 |
| 2684 | GUGGGUGA CUGAUGAG GCCGUUAGGC CGAA IUGAGGUG | 1078 | CACCUCAC C UCACCCAC | 3857 |
| 2685 | CGUGGGUG CUGAUGAG GCCGUUAGGC CGAA IGUGAGGU | 1079 | ACCUCACC U CACCCACG | 3858 |
| 2687 | CGCGUGGG CUGAUGAG GCCGUUAGGC CGAA IAGGUGAG | 1080 | CUCACCUC A CCCACGCG | 3859 |
| 2689 | UUCGCGUG CUGAUGAG GCCGUUAGGC CGAA IUGAGGUG | 1081 | CACCUCAC C CACGCGAA | 3860 |
| 2690 | UUUCGCGU CUGAUGAG GCCGUUAGGC CGAA IGUGAGGU | 1082 | ACCUCACC C ACGCGAAA | 3861 |
| 2691 | UUUUCGCG CUGAUGAG GCCGUUAGGC CGAA IGGUGAGG | 1083 | CCUCACCC A CGCGAAAA | 3862 |
| 2701 | CUGAGGAA CUGAUGAG GCCGUUAGGC CGAA IUUUUCGC | 1084 | GCGAAAAC C UUCCUCAG | 3863 |
| 2702 | CCUGAGGA CUGAUGAG GCCGUUAGGC CGAA IGUUUUCG | 1085 | CGAAAACC U UCCUCAGG | 3864 |
| 2705 | GGUCCUGA CUGAUGAG GCCGUUAGGC CGAA IAAGGUUU | 1086 | AAACCUUC C UCAGGACC | 3865 |
| 2706 | GGGUCCUG CUGAUGAG GCCGUUAGGC CGAA IGAAGGUU | 1087 | AACCUUCC U CAGGACCC | 3866 |
| 2708 | CAGGGUCC CUGAUGAG GCCGUUAGGC CGAA IAGGAAGG | 1088 | CCUUCCUC A GGACCCUG | 3867 |
| 2713 | CGGACCAG CUGAUGAG GCCGUUAGGC CGAA IUCCUGAG | 1089 | CUCAGGAC C CUGGUCCG | 3868 |
| 2714 | UCGGACCA CUGAUGAG GCCGUUAGGC CGAA IGUCCUGA | 1090 | UCAGGACC C UGGUCCGA | 3869 |
| 2715 | CUCGGACC CUGAUGAG GCCGUUAGGC CGAA IGGUCCUG | 1091 | CAGGACCC U GGUCCGAG | 3870 |
| 2720 | GACACCUC CUGAUGAG GCCGUUAGGC CGAA IACCAGGG | 1092 | CCCUGGUC C GAGGUGUC | 3871 |
| 2729 | AUACUCAG CUGAUGAG GCCGUUAGGC CGAA IACACCUC | 1093 | GAGGUGUC C CUGAGUAU | 3872 |
| 2730 | CAUACUCA CUGAUGAG GCCGUUAGGC CGAA IGACACCU | 1094 | AGGUGUCC C UGAGUAUG | 3873 |
| 2731 | CCAUACUC CUGAUGAG GCCGUUAGGC CGAA IGGACACC | 1095 | GGUGUCCC U GAGUAUGG | 3874 |
| 2741 | CACCACGC CUGAUGAG GCCGUUAGGC CGAA ICCAUACU | 1096 | AGUAUGGC U GCGUGGUG | 3875 |
| 2753 | CUUCCGCA CUGAUGAG GCCGUUAGGC CGAA IUUCACCA | 1097 | UGGUGAAC U UGCGGAAG | 3876 |
| 2764 | UUCACCAC CUGAUGAG GCCGUUAGGC CGAA IUCUUCCG | 1098 | CGGAAGAC A GUGGUGAA | 3877 |
| 2774 | UACAGGGA CUGAUGAG GCCGUUAGGC CGAA IUUCACCA | 1099 | UGGUGAAC U UCCCUGUA | 3878 |
| 2777 | UUCUACAG CUGAUGAG GCCGUUAGGC CGAA IAAGUUCA | 1100 | UGAACUUC C CUGUAGAA | 3879 |
| 2778 | CUUCUACA CUGAUGAG GCCGUUAGGC CGAA IGAAGUUC | 1101 | GAACUUCC C UGUAGAAG | 3880 |
| 2779 | UCUUCUAC CUGAUGAG GCCGUUAGGC CGAA IGGAAGUU | 1102 | AACUUCCC U GUAGAAGA | 3881 |
| 2794 | CCACCCAG CUGAUGAG GCCGUUAGGC CGAA ICCUCGUC | 1103 | GACGAGGC C CUGGGUGG | 3882 |
| 2795 | GCCACCCA CUGAUGAG GCCGUUAGGC CGAA IGCCUCGU | 1104 | ACGAGGCC C UGGGUGGC | 3883 |
| 2796 | UGCCACCC CUGAUGAG GCCGUUAGGC CGAA IGGCCUCG | 1105 | CGAGGCCC U GGGUGGCA | 3884 |
| 2804 | AAAAGCCG CUGAUGAG GCCGUUAGGC CGAA ICCACCCA | 1106 | UGGGUGGC A CGGCUUUU | 3885 |
| 2809 | UGAACAAA CUGAUGAG GCCGUUAGGC CGAA ICCGUGCC | 1107 | GGCACGGC U UUUGUUCA | 3886 |
| 2817 | CCGGCAUC CUGAUGAG GCCGUUAGGC CGAA IAACAAAA | 1108 | UUUUGUUC A GAUGCCGG | 3887 |
| 2823 | CGUGGGCC CUGAUGAG GCCGUUAGGC CGAA ICAUCUGA | 1109 | UCAGAUGC C GGCCCACG | 3888 |
| 2827 | AGGCCGUG CUGAUGAG GCCGUUAGGC CGAA ICCGGCAU | 1110 | AUGCCGGC C CACGGCCU | 3889 |
| 2828 | UAGGCCGU CUGAUGAG GCCGUUAGGC CGAA IGCCGGCA | 1111 | UGCCGGCC C ACGGCCUA | 3890 |
| 2829 | AUAGGCCG CUGAUGAG GCCGUUAGGC CGAA IGGCCGGC | 1112 | GCCGGCCC A CGGCCUAU | 3891 |
| 2834 | GGGGAAUA CUGAUGAG GCCGUUAGGC CGAA ICCGUGGG | 1113 | CCCACGGC C UAUUCCCC | 3892 |
| 2835 | AGGGGAAU CUGAUGAG GCCGUUAGGC CGAA IGCCGUGG | 1114 | CCACGGCC U AUUCCCCU | 3893 |
| 2840 | GCACCAGG CUGAUGAG GCCGUUAGGC CGAA IAAUAGGC | 1115 | GCCUAUUC C CCUGGUGC | 3894 |
| 2841 | CGCACCAG CUGAUGAG GCCGUUAGGC CGAA IGAAUAGG | 1116 | CCUAUUCC C CUGGUGCG | 3895 |
| 2842 | CCGCACCA CUGAUGAG GCCGUUAGGC CGAA IGGAAUAG | 1117 | CUAUUCCC C UGGUGCGG | 3896 |
| 2843 | GCCGCACC CUGAUGAG GCCGUUAGGC CGAA IGGGAAUA | 1118 | UAUUCCCC U GGUGCGGC | 3897 |
| 2852 | CAGCAGCA CUGAUGAG GCCGUUAGGC CGAA ICCGCACC | 1119 | GGUGCGGC C UGCUGCUG | 3898 |
| 2853 | CCAGCAGC CUGAUGAG GCCGUUAGGC CGAA IGCCGCAC | 1120 | GUGCGGCC U GCUGCUGG | 3899 |
| 2856 | UAUCCAGC CUGAUGAG GCCGUUAGGC CGAA ICAGGCCG | 1121 | CGGCCUGC U GCUGGAUA | 3900 |
| 2859 | GGGUAUCC CUGAUGAG GCCGUUAGGC CGAA ICAGCAGG | 1122 | CCUGCUGC U GGAUACCC | 3901 |
| 2866 | AGGGUCCG CUGAUGAG GCCGUUAGGC CGAA IUAUCCAG | 1123 | CUGGAUAC C CGGACCCU | 3902 |
| 2867 | CAGGGUCC CUGAUGAG GCCGUUAGGC CGAA IGUAUCCA | 1124 | UGGAUACC C GGACCCUG | 3903 |
| 2872 | ACCUCCAG CUGAUGAG GCCGUUAGGC CGAA IUCCGGGU | 1125 | ACCCGGAC C CUGGAGGU | 3904 |
| 2873 | CACCUCCA CUGAUGAG GCCGUUAGGC CGAA IGUCCGGG | 1126 | CCCGGACC C UGGAGGUG | 3905 |
| 2874 | GCACCUCC CUGAUGAG GCCGUUAGGC CGAA IGGUCCGG | 1127 | CCGGACCC U GGAGGUGC | 3906 |
| 2883 | AGUCGCUC CUGAUGAG GCCGUUAGGC CGAA ICACCUCC | 1128 | GGAGGUGC A GAGCGACU | 3907 |
| 2891 | GCUGGAGU CUGAUGAG GCCGUUAGGC CGAA IUCGCUCU | 1129 | AGAGCGAC U ACUCCAGC | 3908 |
| 2894 | AUAGCUGG CUGAUGAG GCCGUUAGGC CGAA IUAGUCGC | 1130 | GCGACUAC U CCAGCUAU | 3909 |
| 2896 | GCAUAGCU CUGAUGAG GCCGUUAGGC CGAA IAGUAGUC | 1131 | GACUACUC C AGCUAUGC | 3910 |
| 2897 | GGCAUAGC CUGAUGAG GCCGUUAGGC CGAA IGAGUAGU | 1132 | ACUACUCC A GCUAUGCC | 3911 |
| 2900 | CCGGGCAU CUGAUGAG GCCGUUAGGC CGAA ICUGGAGU | 1133 | ACUCCAGC U AUGCCCGG | 3912 |
| 2905 | GAGGUCCG CUGAUGAG GCCGUUAGGC CGAA ICAUAGCU | 1134 | AGCUAUGC C CGGACCUC | 3913 |
| 2906 | GGAGGUCC CUGAUGAG GCCGUUAGGC CGAA IGCAUAGC | 1135 | GCUAUGCC C GGACCUCC | 3914 |
| 2911 | CUGAUGGA CUGAUGAG GCCGUUAGGC CGAA IUCCGGGC | 1136 | GCCCGGAC C UCCAUCAG | 3915 |
| 2912 | UCUGAUGG CUGAUGAG GCCGUUAGGC CGAA IGUCCGGG | 1137 | CCCGGACC U CCAUCAGA | 3916 |
| 2914 | GCUCUGAU CUGAUGAG GCCGUUAGGC CGAA IAGGUCCG | 1138 | CGGACCUC C AUCAGAGC | 3917 |
| 2915 | GGCUCUGA CUGAUGAG GCCGUUAGGC CGAA IGAGGUCC | 1139 | GGACCUCC A UCAGAGCC | 3918 |
| 2918 | ACUGGCUC CUGAUGAG GCCGUUAGGC CGAA IAUGGAGG | 1140 | CCUCCAUC A GAGCCAGU | 3919 |
| 2923 | GUGAGACU CUGAUGAG GCCGUUAGGC CGAA ICUCUGAU | 1141 | AUCAGAGC C AGUCUCAC | 3920 |
| 2924 | GGUGAGAC CUGAUGAG GCCGUUAGGC CGAA IGCUCUGA | 1142 | UCAGAGCC A GUCUCACC | 3921 |
| 2928 | UGAAGGUG CUGAUGAG GCCGUUAGGC CGAA IACUGGCU | 1143 | AGCCAGUC U CACCUUCA | 3922 |
| 2930 | GUUGAAGG CUGAUGAG GCCGUUAGGC CGAA IAGACUGG | 1144 | CCAGUCUC A CCUUCAAC | 3923 |
| 2932 | CGGUUGAA CUGAUGAG GCCGUUAGGC CGAA IUGAGACU | 1145 | AGUCUCAC C UUCAACCG | 3924 |
| 2933 | GCGGUUGA CUGAUGAG GCCGUUAGGC CGAA IGUGAGAC | 1146 | GUCUCACC U UCAACCGC | 3925 |
| 2936 | GCCGCGGU CUGAUGAG GCCGUUAGGC CGAA IAAGGUGA | 1147 | UCACCUUC A ACCGCGGC | 3926 |
| 2939 | GAAGCCGC CUGAUGAG GCCGUUAGGC CGAA IUUGAAGG | 1148 | CCUUCAAC C GCGGCUUC | 3927 |
| 2945 | AGCCUUGA CUGAUGAG GCCGUUAGGC CGAA ICCGCGGU | 1149 | ACCGCGGC U UCAAGGCU | 3928 |
| 2948 | CCCAGCCU CUGAUGAG GCCGUUAGGC CGAA IAAGCCGC | 1150 | GCGGCUUC A AGGCUGGG | 3929 |
| 2953 | UUCCUCCC CUGAUGAG GCCGUUAGGC CGAA ICCUUGAA | 1151 | UUCAAGGC U GGGAGGAA | 3930 |
| 2963 | GCGACGCA CUGAUGAG GCCGUUAGGC CGAA IUUCCUCC | 1152 | GGAGGAAC A UGCGUCGC | 3931 |
| 2972 | AAAGAGUU CUGAUGAG GCCGUUAGGC CGAA ICGACGCA | 1153 | UGCGUCGC A AACUCUUU | 3932 |
| 2976 | CCCCAAAG CUGAUGAG GCCGUUAGGC CGAA IUUUGCGA | 1154 | UCGCAAAC U CUUUGGGG | 3933 |
| 2978 | GACCCCAA CUGAUGAG GCCGUUAGGC CGAA IAGUUUGC | 1155 | GCAAACUC U UUGGGGUC | 3934 |
| 2987 | CAGCCGCA CUGAUGAG GCCGUUAGGC CGAA IACCCCAA | 1156 | UUGGGGUC U UGCGGCUG | 3935 |
| 2994 | GACACUUC CUGAUGAG GCCGUUAGGC CGAA ICCGCAAG | 1157 | CUUGCGGC U GAAGUGUC | 3936 |
| 3003 | ACAGGCUG CUGAUGAG GCCGUUAGGC CGAA IACACUUC | 1158 | GAAGUGUC A CAGCCUGU | 3937 |
| 3005 | AAACAGGC CUGAUGAG GCCGUUAGGC CGAA IUGACACU | 1159 | AGUGUCAC A GCCUGUUU | 3938 |
| 3008 | CAGAAACA CUGAUGAG GCCGUUAGGC CGAA ICUGUGAC | 1160 | GUCACAGC C UGUUUCUG | 3939 |
| 3009 | CCAGAAAC CUGAUGAG GCCGUUAGGC CGAA IGCUGUGA | 1161 | UCACAGCC U GUUUCUGG | 3940 |
| 3015 | GCAAAUCC CUGAUGAG GCCGUUAGGC CGAA IAAACAGG | 1162 | CCUGUUUC U GGAUUUGC | 3941 |
| 3024 | UGUUCACC CUGAUGAG GCCGUUAGGC CGAA ICAAAUCC | 1163 | GGAUUUGC A GGUGAACA | 3942 |
| 3032 | CUGGAGGC CUGAUGAG GCCGUUAGGC CGAA IUUCACCU | 1164 | AGGUGAAC A GCCUCCAG | 3943 |
| 3035 | CGUCUGGA CUGAUGAG GCCGUUAGGC CGAA ICUGUUCA | 1165 | UGAACAGC C UCCAGACG | 3944 |
| 3036 | CCGUCUGG CUGAUGAG GCCGUUAGGC CGAA IGCUGUUC | 1166 | GAACAGCC U CCAGACGG | 3945 |
| 3038 | CACCGUCU CUGAUGAG GCCGUUAGGC CGAA IAGGCUGU | 1167 | ACAGCCUC C AGACGGUG | 3946 |
| 3039 | ACACCGUC CUGAUGAG GCCGUUAGGC CGAA IGAGGCUG | 1168 | CAGCCUCC A GACGGUGU | 3947 |
| 3050 | GAUGUUGG CUGAUGAG GCCGUUAGGC CGAA ICACACCG | 1169 | CGGUGUGC A CCAACAUC | 3948 |
| 3052 | UAGAUGUU CUGAUGAG GCCGUUAGGC CGAA IUGCACAC | 1170 | GUGUGCAC C AACAUCUA | 3949 |
| 3053 | GUAGAUGU CUGAUGAG GCCGUUAGGC CGAA IGUGCACA | 1171 | UGUGCACC A ACAUCUAC | 3950 |
| 3056 | CUUGUAGA CUGAUGAG GCCGUUAGGC CGAA IUUGGUGC | 1172 | GCACCAAC A UCUACAAG | 3951 |
| 3059 | GAUCUUGU CUGAUGAG GCCGUUAGGC CGAA IAUGUUGG | 1173 | CCAACAUC U ACAAGAUC | 3952 |
| 3062 | GAGGAUCU CUGAUGAG GCCGUUAGGC CGAA IUAGAUGU | 1174 | ACAUCUAC A AGAUCCUC | 3953 |
| 3068 | CAGCAGGA CUGAUGAG GCCGUUAGGC CGAA IAUCUUGU | 1175 | ACAAGAUC C UCCUGCUG | 3954 |
| 3069 | GCAGCAGG CUGAUGAG GCCGUUAGGC CGAA IGAUCUUG | 1176 | CAAGAUCC U CCUGCUGC | 3955 |
| 3071 | CUGCAGCA CUGAUGAG GCCGUUAGGC CGAA IAGGAUCU | 1177 | AGAUCCUC C UGCUGCAG | 3956 |
| 3072 | CCUGCAGC CUGAUGAG GCCGUUAGGC CGAA IGAGGAUC | 1178 | GAUCCUCC U GCUGCAGG | 3957 |
| 3075 | ACGCCUGC CUGAUGAG GCCGUUAGGC CGAA ICAGGAGG | 1179 | CCUCCUGC U GCAGGCGU | 3958 |
| 3078 | UGUACGCC CUGAUGAG GCCGUUAGGC CGAA ICAGCAGG | 1180 | CCUGCUGC A GGCGUACA | 3959 |
| 3086 | GUGAAACC CUGAUGAG GCCGUUAGGC CGAA IUACGCCU | 1181 | AGGCGUAC A GGUUUCAC | 3960 |
| 3093 | CACAUGCG CUGAUGAG GCCGUUAGGC CGAA IAAACCUG | 1182 | CAGGUUUC A CGCAUGUG | 3961 |
| 3097 | AGCACACA CUGAUGAG GCCGUUAGGC CGAA ICGUGAAA | 1183 | UUUCACGC A UGUGUGCU | 3962 |
| 3105 | GGAGCUGC CUGAUGAG GCCGUUAGGC CGAA ICACACAU | 1184 | AUGUGUGC U GCAGCUCC | 3963 |
| 3108 | AUGGGAGC CUGAUGAG GCCGUUAGGC CGAA ICAGCACA | 1185 | UGUGCUGC A GCUCCCAU | 3964 |
| 3111 | GAAAUGGG CUGAUGAG GCCGUUAGGC CGAA ICUGCAGC | 1186 | GCUGCAGC U CCCAUUUC | 3965 |
| 3113 | AUGAAAUG CUGAUGAG GCCGUUAGGC CGAA IAGCUGCA | 1187 | UGCAGCUC C CAUUUCAU | 3966 |
| 3114 | GAUGAAAU CUGAUGAG GCCGUUAGGC CGAA IGAGCUGC | 1188 | GCAGCUCC C AUUUCAUC | 3967 |
| 3115 | UGAUGAAA CUGAUGAG GCCGUUAGGC CGAA IGGAGCUG | 1189 | CAGCUCCC A UUUCAUCA | 3968 |
| 3120 | CUUGCUGA CUGAUGAG GCCGUUAGGC CGAA IAAAUGGG | 1190 | CCCAUUUC A UCAGCAAG | 3969 |
| 3123 | AAACUUGC CUGAUGAG GCCGUUAGGC CGAA IAUGAAAU | 1191 | AUUUCAUC A GCAAGUUU | 3970 |
| 3126 | UCCAAACU CUGAUGAG GCCGUUAGGC CGAA ICUGAUGA | 1192 | UCAUCAGC A AGUUUGGA | 3971 |
| 3140 | AAAUGUGG CUGAUGAG GCCGUUAGGC CGAA IUUCUUCC | 1193 | GGAAGAAC C CCACAUUU | 3972 |
| 3141 | AAAAUGUG CUGAUGAG GCCGUUAGGC CGAA IGUUCUUC | 1194 | GAAGAACC C CACAUUUU | 3973 |
| 3142 | AAAAAUGU CUGAUGAG GCCGUUAGGC CGAA IGGUUCUU | 1195 | AAGAACCC C ACAUUUUU | 3974 |
| 3143 | GAAAAAUG CUGAUGAG GCCGUUAGGC CGAA IGGGUUCU | 1196 | AGAACCCC A CAUUUUUC | 3975 |
| 3145 | AGGAAAAA CUGAUGAG GCCGUUAGGC CGAA IUGGGGUU | 1197 | AACCCCAC A UUUUUCCU | 3976 |
| 3152 | GACGCGCA CUGAUGAG GCCGUUAGGC CGAA IAAAAAUG | 1198 | CAUUUUUC C UGCGCGUC | 3977 |
| 3153 | UGACGCGC CUGAUGAG GCCGUUAGGC CGAA IGAAAAAU | 1199 | AUUUUUCC U GCGCGUCA | 3978 |
| 3161 | GUCAGAGA CUGAUGAG GCCGUUAGGC CGAA IACGCGCA | 1200 | UGCGCGUC A UCUCUGAC | 3979 |
| 3164 | CGUGUCAG CUGAUGAG GCCGUUAGGC CGAA IAUGACGC | 1201 | GCGUCAUC U CUGACACG | 3980 |
| 3166 | GCCGUGUC CUGAUGAG GCCGUUAGGC CGAA IAGAUGAC | 1202 | GUCAUCUC U GACACGGC | 3981 |
| 3170 | GGAGGCCG CUGAUGAG GCCGUUAGGC CGAA IUCAGAGA | 1203 | UCUCUGAC A CGGCCUCC | 3982 |
| 3175 | CAGAGGGA CUGAUGAG GCCGUUAGGC CGAA ICCGUGUC | 1204 | GACACGGC C UCCCUCUG | 3983 |
| 3176 | GCAGAGGG CUGAUGAG GCCGUUAGGC CGAA IGCCGUGU | 1205 | ACACGGCC U CCCUCUGC | 3984 |
| 3178 | UAGCAGAG CUGAUGAG GCCGUUAGGC CGAA IAGGCCGU | 1206 | ACGGCCUC C CUCUGCUA | 3985 |
| 3179 | GUAGCAGA CUGAUGAG GCCGUUAGGC CGAA IGAGGCCG | 1207 | CGGCCUCC C UCUGCUAC | 3986 |
| 3180 | AGUAGCAG CUGAUGAG GCCGUUAGGC CGAA IGGAGGCC | 1208 | GGCCUCCC U CUGCUACU | 3987 |
| 3182 | GGAGUAGC CUGAUGAG GCCGUUAGGC CGAA IAGGGAGG | 1209 | CCUCCCUC U GCUACUCC | 3988 |
| 3185 | GAUGGAGU CUGAUGAG GCCGUUAGGC CGAA ICAGAGGG | 1210 | CCCUCUGC U ACUCCAUC | 3989 |
| 3188 | CAGGAUGG CUGAUGAG GCCGUUAGGC CGAA IUAGCAGA | 1211 | UCUGCUAC U CCAUCCUG | 3990 |
| 3190 | UUCAGGAU CUGAUGAG GCCGUUAGGC CGAA IAGUAGCA | 1212 | UGCUACUC C AUCCUGAA | 3991 |
| 3191 | UUUCAGGA CUGAUGAG GCCGUUAGGC CGAA IGAGUAGC | 1213 | GCUACUCC A UCCUGAAA | 3992 |
| 3194 | GGCUUUCA CUGAUGAG GCCGUUAGGC CGAA IAUGGAGU | 1214 | ACUCCAUC C UGAAAGCC | 3993 |
| 3195 | UGGCUUUC CUGAUGAG GCCGUUAGGC CGAA IGAUGGAG | 1215 | CUCCAUCC U GAAAGCCA | 3994 |
| 3202 | GCGUUCUU CUGAUGAG GCCGUUAGGC CGAA ICUUUCAG | 1216 | CUGAAAGC C AAGAACGC | 3995 |
| 3203 | UGCGUUCU CUGAUGAG GCCGUUAGGC CGAA IGCUUUCA | 1217 | UGAAAGCC A AGAACGCA | 3996 |
| 3211 | GACAUCCC CUGAUGAG GCCGUUAGGC CGAA ICGUUCUU | 1218 | AAGAACGC A GGGAUGUC | 3997 |
| 3222 | UGGCCCCC CUGAUGAG GCCGUUAGGC CGAA ICGACAUC | 1219 | GAUGUCGC U GGGGGCCA | 3998 |
| 3229 | GCGCCCUU CUGAUGAG GCCGUUAGGC CGAA ICCCCCAG | 1220 | CUGGGGGC C AAGGGCGC | 3999 |
| 3230 | GGCGCCCU CUGAUGAG GCCGUUAGGC CGAA IGCCCCCA | 1221 | UGGGGGCC A AGGGCGCC | 4000 |
| 3238 | GGGCCGGC CUGAUGAG GCCGUUAGGC CGAA ICGCCCUU | 1222 | AAGGGCGC C GCCGGCCC | 4001 |
| 3241 | AGAGGGCC CUGAUGAG GCCGUUAGGC CGAA ICGGCGCC | 1223 | GGCGCCGC C GGCCCUCU | 4002 |
| 3245 | GGGCAGAG CUGAUGAG GCCGUUAGGC CGAA ICCGGCGG | 1224 | CCGCCGGC C CUCUGCCC | 4003 |
| 3246 | AGGGCAGA CUGAUGAG GCCGUUAGGC CGAA IGCCGGCG | 1225 | CGCCGGCC C UCUGCCCU | 4004 |
| 3247 | GAGGGCAG CUGAUGAG GCCGUUAGGC CGAA IGGCCGGC | 1226 | GCCGGCCC U CUGCCCUC | 4005 |
| 3249 | CGGAGGGC CUGAUGAG GCCGUUAGGC CGAA IAGGGCCG | 1227 | CGGCCCUC U GCCCUCCG | 4006 |
| 3252 | CCUCGGAG CUGAUGAG GCCGUUAGGC CGAA ICAGAGGG | 1228 | CCCUCUGC C CUCCGAGG | 4007 |
| 3253 | GCCUCGGA CUGAUGAG GCCGUUAGGC CGAA IGCAGAGG | 1229 | CCUCUGCC C UCCGAGGC | 4008 |
| 3254 | GGCCUCGG CUGAUGAG GCCGUUAGGC CGAA IGGCAGAG | 1230 | CUCUGCCC U CCGAGGCC | 4009 |
| 3256 | ACGGCCUC CUGAUGAG GCCGUUAGGC CGAA IAGGGCAG | 1231 | CUGCCCUC C GAGGCCGU | 4010 |
| 3262 | CACUGCAC CUGAUGAG GCCGUUAGGC CGAA ICCUCGGA | 1232 | UCCGAGGC C GUGCAGUG | 4011 |
| 3267 | ACAGCCAC CUGAUGAG GCCGUUAGGC CGAA ICACGGCC | 1233 | GGCCGUGC A GUGGCUGU | 4012 |
| 3273 | GGUGGCAC CUGAUGAG GCCGUUAGGC CGAA ICCACUGC | 1234 | GCAGUGGC U GUGCCACC | 4013 |
| 3278 | UGCUUGGU CUGAUGAG GCCGUUAGGC CGAA ICACAGCC | 1235 | GGCUGUGC C ACCAAGCA | 4014 |
| 3279 | AUGCUUGG CUGAUGAG GCCGUUAGGC CGAA IGCACAGC | 1236 | GCUGUGCC A CCAAGCAU | 4015 |
| 3281 | GAAUGCUU CUGAUGAG GCCGUUAGGC CGAA IUGGCACA | 1237 | UGUGCCAC C AAGCAUUC | 4016 |
| 3282 | GGAAUGCU CUGAUGAG GCCGUUAGGC CGAA IGUGGCAC | 1238 | GUGCCACC A AGCAUUCC | 4017 |
| 3286 | AGCAGGAA CUGAUGAG GCCGUUAGGC CGAA ICUUGGUG | 1239 | CACCAAGC A UUCCUGCU | 4018 |
| 3290 | CUUGAGCA CUGAUGAG GCCGUUAGGC CGAA IAAUGCUU | 1240 | AAGCAUUC C UGCUCAAG | 4019 |
| 3291 | GCUUGAGC CUGAUGAG GCCGUUAGGC CGAA IGAAUGCU | 1241 | AGCAUUCC U GCUCAAGC | 4020 |
| 3294 | UCAGCUUG CUGAUGAG GCCGUUAGGC CGAA ICAGGAAU | 1242 | AUUCCUGC U CAAGCUGA | 4021 |
| 3296 | AGUCAGCU CUGAUGAG GCCGUUAGGC CGAA IAGCAGGA | 1243 | UCCUGCUC A AGCUGACU | 4022 |
| 3300 | GUCGAGUC CUGAUGAG GCCGUUAGGC CGAA ICUUGAGC | 1244 | GCUCAAGC U GACUCGAC | 4023 |
| 3304 | CGGUGUCG CUGAUGAG GCCGUUAGGC CGAA IUCAGCUU | 1245 | AAGCUGAC U CGACACCG | 4024 |
| 3309 | UGACACGG CUGAUGAG GCCGUUAGGC CGAA IUCGAGUC | 1246 | GACUCGAC A CCGUGUCA | 4025 |
| 3311 | GGUGACAC CUGAUGAG GCCGUUAGGC CGAA IUGUCGAG | 1247 | CUCGACAC C GUGUCACC | 4026 |
| 3317 | CACGUAGG CUGAUGAG GCCGUUAGGC CGAA IACACGGU | 1248 | ACCGUGUC A CCUACGUG | 4027 |
| 3319 | GGCACGUA CUGAUGAG GCCGUUAGGC CGAA IUGACACG | 1249 | CGUGUCAC C UACGUGCC | 4028 |
| 3320 | UGGCACGU CUGAUGAG GCCGUUAGGC CGAA IGUGACAC | 1250 | GUGUCACC U ACGUGCCA | 4029 |
| 3327 | CCAGGAGU CUGAUGAG GCCGUUAGGC CGAA ICACGUAG | 1251 | CUACGUGC C ACUCCUGG | 4030 |
| 3328 | CCCAGGAG CUGAUGAG GCCGUUAGGC CGAA IGCACGUA | 1252 | UACGUGCC A CUCCUGGG | 4031 |
| 3330 | ACCCCAGG CUGAUGAG GCCGUUAGGC CGAA IUGGCACG | 1253 | CGUGCCAC U CCUGGGGU | 4032 |
| 3332 | UGACCCCA CUGAUGAG GCCGUUAGGC CGAA IAGUGGCA | 1254 | UGCCACUC C UGGGGUCA | 4033 |
| 3333 | GUGACCCC CUGAUGAG GCCGUUAGGC CGAA IGAGUGGC | 1255 | GCCACUCC U GGGGUCAC | 4034 |
| 3340 | GUCCUGAG CUGAUGAG GCCGUUAGGC CGAA IACCCCAG | 1256 | CUGGGGUC A CUCAGGAC | 4035 |
| 3342 | CUGUCCUG CUGAUGAG GCCGUUAGGC CGAA IUGACCCC | 1257 | GGGGUCAC U CAGGACAG | 4036 |
| 3344 | GGCUGUCC CUGAUGAG GCCGUUAGGC CGAA IAGUGACC | 1258 | GGUCACUC A GGACAGCC | 4037 |
| 3349 | GUCUGGGC CUGAUGAG GCCGUUAGGC CGAA IUCCUGAG | 1259 | CUCAGGAC A GCCCAGAC | 4038 |
| 3352 | UGCGUCUG CUGAUGAG GCCGUUAGGC CGAA ICUGUCCU | 1260 | AGGACAGC C CAGACGCA | 4039 |
| 3353 | CUGCGUCU CUGAUGAG GCCGUUAGGC CGAA IGCUGUCC | 1261 | GGACAGCC C AGACGCAG | 4040 |
| 3354 | GCUGCGUC CUGAUGAG GCCGUUAGGC CGAA IGGCUGUC | 1262 | GACAGCCC A GACGCAGC | 4041 |
| 3360 | GACUCAGC CUGAUGAG GCCGUUAGGC CGAA ICGUCUGG | 1263 | CCAGACGC A GCUGAGUC | 4042 |
| 3363 | UCCGACUC CUGAUGAG GCCGUUAGGC CGAA ICUGCGUC | 1264 | GACGCAGC U GAGUCGGA | 4043 |
| 3375 | UCCCCGGG CUGAUGAG GCCGUUAGGC CGAA ICUUCCGA | 1265 | UCGGAAGC U CCCGGGGA | 4044 |
| 3377 | CGUCCCCG CUGAUGAG GCCGUUAGGC CGAA IAGCUUCC | 1266 | GGAAGCUC C CGGGGACG | 4045 |
| 3378 | UCGUCCCC CUGAUGAG GCCGUUAGGC CGAA IGAGCUUC | 1267 | GAAGCUCC C GGGGACGA | 4046 |
| 3390 | GGGCAGUC CUGAUGAG GCCGUUAGGC CGAA ICGUCGUC | 1268 | GACGACGC U GACUGCCC | 4047 |
| 3394 | UCCAGGGC CUGAUGAG GCCGUUAGGC CGAA IUCAGCGU | 1269 | ACGCUGAC U GCCCUGGA | 4048 |
| 3397 | GCCUCCAG CUGAUGAG GCCGUUAGGC CGAA ICAGUCAG | 1270 | CUGACUGC C CUGGAGGC | 4049 |
| 3398 | GOCCUCCA CUGAUGAG GCCGUUAGGC CGAA IGCAGUCA | 1271 | UGACUGCC C UGGAGGCC | 4050 |
| 3399 | CGGCCUCC CUGAUGAG GCCGUUAGGC CGAA IGGCAGUC | 1272 | GACUGCCC U GGAGGCCG | 4051 |
| 3406 | UUGGCUGC CUGAUGAG GCCGUUAGGC CGAA ICCUCCAG | 1273 | CUGGAGGC C GCAGCCAA | 4052 |
| 3409 | GGGUUGGC CUGAUGAG GCCGUUAGGC CGAA ICGGCCUC | 1274 | GAGGCCGC A GCCAACCC | 4053 |
| 3412 | GCCGGGUU CUGAUGAG GCCGUUAGGC CGAA ICUGCGGC | 1275 | GCCGCAGC C AACCCGGC | 4054 |
| 3413 | UGCCGGGU CUGAUGAG GCCGUUAGGC CGAA IGCUGCGG | 1276 | CCGCAGCC A ACCCGGCA | 4055 |
| 3416 | CAGUGCCG CUGAUGAG GCCGUUAGGC CGAA IUUGGCUG | 1277 | CAGCCAAC C CGGCACUG | 4056 |
| 3417 | GCAGUGCC CUGAUGAG GCCGUUAGGC CGAA IGUUGGCU | 1278 | AGCCAACC C GGCACUGC | 4057 |
| 3421 | GAGGGCAG CUGAUGAG GCCGUUAGGC CGAA ICCGGGUU | 1279 | AACCCGGC A CUGCCCUC | 4058 |
| 3423 | CUGAGGGC CUGAUGAG GCCGUUAGGC CGAA IUGCCGGG | 1280 | CCCGGCAC U GCCCUCAG | 4059 |
| 3426 | AGUCUGAG CUGAUGAG GCCGUUAGGC CGAA ICAGUGCC | 1281 | GGCACUGC C CUCAGACU | 4060 |
| 3427 | AAGUCUGA CUGAUGAG GCCGUUAGGC CGAA IGCAGUGC | 1282 | GCACUGCC C UCAGACUU | 4061 |
| 3428 | GAAGUCUG CUGAUGAG GCCGUUAGGC CGAA IGGCAGUG | 1283 | CACUGCCC U CAGACUUC | 4062 |
| 3430 | UUGAAGUC CUGAUGAG GCCGUUAGGC CGAA IAGGGCAG | 1284 | CUGCCCUC A GACUUCAA | 4063 |
| 3434 | GGUCUUGA CUGAUGAG GCCGUUAGGC CGAA IUCUGAGG | 1285 | CCUCAGAC U UCAAGACC | 4064 |
| 3437 | GAUGGUCU CUGAUGAG GCCGUUAGGC CGAA IAAGUCUG | 1286 | CAGACUUC A AGACCAUC | 4065 |
| 3442 | UCCAGGAU CUGAUGAG GCCGUUAGGC CGAA IUCUUGAA | 1287 | UUCAAGAC C AUCCUGGA | 4066 |
| 3443 | GUCCAGGA CUGAUGAG GCCGUUAGGC CGAA IGUCUUGA | 1288 | UCAAGACC A UCCUGGAC | 4067 |
| 3446 | UCAGUCCA CUGAUGAG GCCGUUAGGC CGAA IAUGGUCU | 1289 | AGACCAUC C UGGACUGA | 4068 |
| 3447 | AUCAGUCC CUGAUGAG GCCGUUAGGC CGAA IGAUGGUC | 1290 | GACCAUCC U GGACUGAU | 4069 |
| 3452 | UGGCCAUC CUGAUGAG GCCGUUAGGC CGAA TUCCAGGA | 1291 | UCCUGGAC U GAUGGCCA | 4070 |
| 3459 | GGGCGGGU CUGAUGAG GCCGUUAGGC CGAA ICCAUCAG | 1292 | CUGAUGGC C ACCCGCCC | 4071 |
| 3460 | UGGGCGGG CUGAUGAG GCCGUUAGGC CGAA IGCCAUCA | 1293 | UGAUGGCC A CCCGCCCA | 4072 |
| 3462 | UGUGGGCG CUGAUGAG GCCGUUAGGC CGAA IUGGCCAU | 1294 | AUGGCCAC C CGCCCACA | 4073 |
| 3463 | CUGUGGGC CUGAUGAG GCCGUUAGGC CGAA IGUGGCCA | 1295 | UGGCCACC C GCCCACAG | 4074 |
| 3466 | UGGCUGUG CUGAUGAG GCCGUUAGGC CGAA ICGGGUGG | 1296 | CCACCCGC C CACAGCCA | 4075 |
| 3467 | CUGGCUGU CUGAUGAG GCCGUUAGGC CGAA IGCGGGUG | 1297 | CACCCGCC C ACAGCCAG | 4076 |
| 3468 | CCUGGCUG CUGAUGAG GCCGUUAGGC CGAA IGGCGGGU | 1298 | ACCCGCCC A CAGCCAGG | 4077 |
| 3470 | GGCCUGGC CUGAUGAG GCCGUUAGGC CGAA IUGGGCGG | 1299 | CCGCCCAC A GCCAGGCC | 4078 |
| 3473 | CUCGGCCU CUGAUGAG GCCGUUAGGC CGAA ICUGUGGG | 1300 | CCCACAGC C AGGCCGAG | 4079 |
| 3474 | UCUCGGCC CUGAUGAG GCCGUUAGGC CGAA IGCUGUGG | 1301 | CCACAGCC A GGCCGAGA | 4080 |
| 3478 | CUGCUCUC CUGAUGAG GCCGUUAGGC CGAA ICCUGGCU | 1302 | AGCCAGGC C GAGAGCAG | 4081 |
| 3485 | CUGGUGUC CUGAUGAG GCCGUUAGGC CGAA ICUCUCGG | 1303 | CCGAGAGC A GACACCAG | 4082 |
| 3489 | GCUGCUGG CUGAUGAG GCCGUUAGGC CGAA IUCUGCUC | 1304 | GAGCAGAC A CCAGCAGC | 4083 |
| 3491 | GGGCUGCU CUGAUGAG GCCGUUAGGC CGAA IUGUCUGC | 1305 | GCAGACAC C AGCAGCCC | 4084 |
| 3492 | AGGGCUGC CUGAUGAG GCCGUUAGGC CGAA IGUGUCUG | 1306 | CAGACACC A GCAGCCCU | 4085 |
| 3495 | GACAGGGC CUGAUGAG GCCGUUAGGC CGAA ICUGGUGU | 1307 | ACACCAGC A GCCCUGUC | 4086 |
| 3498 | CGUGACAG CUGAUGAG GCCGUUAGGC CGAA ICUGCUGG | 1308 | CCAGCAGC C CUGUCACG | 4087 |
| 3499 | GCGUGACA CUGAUGAG GCCGUUAGGC CGAA IGCUGCUG | 1309 | CAGCAGCC C UGUCACGC | 4088 |
| 3500 | GGCGUGAC CUGAUGAG GCCGUUAGGC CGAA IGGCUGCU | 1310 | AGCAGCCC U GUCACGCC | 4089 |
| 3504 | GCCCGGCG CUGAUGAG GCCGUUAGGC CGAA IACAGGGC | 1311 | GCCCUGUC A CGCCGGGC | 4090 |
| 3508 | UAGAGCCC CUGAUGAG GCCGUUAGGC CGAA ICGUGACA | 1312 | UGUCACGC C GGGCUCUA | 4091 |
| 3513 | GGACGUAG CUGAUGAG GCCGUUAGGC CGAA ICCCGGCG | 1313 | CGCCGGGC U CUACGUCC | 4092 |
| 3515 | UGGGACGU CUGAUGAG GCCGUUAGGC CGAA IAGCCCGG | 1314 | CCGGGCUC U ACGUCCCA | 4093 |
| 3521 | CCUCCCUG CUGAUGAG GCCGUUAGGC CGAA IACGUAGA | 1315 | UCUACGUC C CAGGGAGG | 4094 |
| 3522 | CCCUCCCU CUGAUGAG GCCGUUAGGC CGAA IGACGUAG | 1316 | CUACGUCC C AGGGAGGG | 4095 |
| 3523 | UCCCUCCC CUGAUGAG GCCGUUAGGC CGAA IGGACGUA | 1317 | UACGUCCC A GGGAGGGA | 4096 |
| 3540 | UGGGUGUG CUGAUGAG GCCGUUAGGC CGAA ICCGCCCC | 1318 | GGGGCGGC C CACACCCA | 4097 |
| 3541 | CUGGGUGU CUGAUGAG GCCGUUAGGC CGAA IGCCGCCC | 1319 | GGGCGGCC C ACACCCAG | 4098 |
| 3542 | CCUGGGUG CUGAUGAG GCCGUUAGGC CGAA IGGCCGCC | 1320 | GGCGGCCC A CACCCAGG | 4099 |
| 3544 | GGCCUGGG CUGAUGAG GCCGUUAGGC CGAA IUGGGCCG | 1321 | CGGCCCAC A CCCAGGCC | 4100 |
| 3546 | CGGGCCUG CUGAUGAG GCCGUUAGGC CGAA IUGUGGGC | 1322 | GCCCACAC C CAGGCCCG | 4101 |
| 3547 | GCGGGCCU CUGAUGAG GCCGUUAGGC CGAA IGUGUGGG | 1323 | CCCACACC C AGGCCCGC | 4102 |
| 3548 | UGCGGGCC CUGAUGAG GCCGUUAGGC CGAA IGGUGUGG | 1324 | CCACACCC A GGCCCGCA | 4103 |
| 3552 | GCGGUGCG CUGAUGAG GCCGUUAGGC CGAA ICCUGGGU | 1325 | ACCCAGGC C CGCACCGC | 4104 |
| 3553 | AGCGGUGC CUGAUGAG GCCGUUAGGC CGAA IGCCUGGG | 1326 | CCCAGGCC C GCACCGCU | 4105 |
| 3556 | CCCAGCGG CUGAUGAG GCCGUUAGGC CGAA ICGGGCCU | 1327 | AGGCCCGC A CCGCUGGG | 4106 |
| 3558 | CUCCCAGC CUGAUGAG GCCGUUAGGC CGAA IUGCGGGC | 1328 | GCCCGCAC C GCUGGGAG | 4107 |
| 3561 | AGACUCCC CUGAUGAG GCCGUUAGGC CGAA ICGGUGCG | 1329 | CGCACCGC U GGGAGUCU | 4108 |
| 3569 | CAGGCCUC CUGAUGAG GCCGUUAGGC CGAA IACUCCCA | 1330 | UGGGAGUC U GAGGCCUG | 4109 |
| 3575 | CUCACUCA CUGAUGAG GCCGUUAGGC CGAA ICCUCAGA | 1331 | UCUGAGGC C UGAGUGAG | 4110 |
| 3576 | ACUCACUC CUGAUGAG GCCGUUAGGC CGAA IGCCUCAG | 1332 | CUGAGGCC U GAGUGAGU | 4111 |
| 3592 | CAGOCCUC CUGAUGAG GCCGUUAGGC CGAA ICCAAACA | 1333 | UGUUUGGC C GAGGCCUG | 4112 |
| 3598 | GACAUGCA CUGAUGAG GCCGUUAGGC CGAA ICCUCGGC | 1334 | GCCGAGGC C UGCAUGUC | 4113 |
| 3599 | GGACAUGC CUGAUGAG GCCGUUAGGC CGAA IGCCUCGG | 1335 | CCGAGGCC U GCAUGUCC | 4114 |
| 3602 | GCCGGACA CUGAUGAG GCCGUUAGGC CGAA ICAGGCCU | 1336 | AGGCCUGC A UGUCCGGC | 4115 |
| 3607 | CUUCAGCC CUGAUGAG GCCGUUAGGC CGAA IACAUGCA | 1337 | UGCAUGUC C GGCUGAAG | 4116 |
| 3611 | CAGCCUUC CUGAUGAG GCCGUUAGGC CGAA ICCGGACA | 1338 | UGUCCGGC U GAAGGCUG | 4117 |
| 3618 | GGACACUC CUGAUGAG GCCGUUAGGC CGAA ICCUUCAG | 1339 | CUGAAGGC U GAGUGUCC | 4118 |
| 3626 | CCUCAGCC CUGAUGAG GCCGUUAGGC CGAA IACACUCA | 1340 | UGAGUGUC C GGCUGAGG | 4119 |
| 3630 | CAGGCCUC CUGAUGAG GCCGUUAGGC CGAA ICCGGACA | 1341 | UGUCCGGC U GAGGCCUG | 4120 |
| 3636 | CUCGCUCA CUGAUGAG GCCGUUAGGC CGAA ICCUCAGC | 1342 | GCUGAGGC C UGAGCGAG | 4121 |
| 3637 | ACUCGCUC CUGAUGAG GCCGUUAGGC CGAA IGCCUCAG | 1343 | CUGAGGCC U GAGCGAGU | 4122 |
| 3649 | CCUUGGCU CUGAUGAG GCCGUUAGGC CGAA IACACUCG | 1344 | CGAGUGUC C AGCCAAGG | 4123 |
| 3650 | CCCUUGGC CUGAUGAG GCCGUUAGGC CGAA IGACACUC | 1345 | GAGUGUCC A GCCAAGGG | 4124 |
| 3653 | CAGCCCUU CUGAUGAG GCCGUUAGGC CGAA ICUGGACA | 1346 | UGUCCAGC C AAGGGCUG | 4125 |
| 3654 | UCAGCCCU CUGAUGAG GCCGUUAGGC CGAA IGCUGGAC | 1347 | GUCCAGCC A AGGGCUGA | 4126 |
| 3660 | GGACACUC CUGAUGAG GCCGUUAGGC CGAA ICCCUUGG | 1348 | CCAAGGGC U GAGUGUCC | 4127 |
| 3668 | GGUGUGCU CUGAUGAG GCCGUUAGGC CGAA IACACUCA | 1349 | UGAGUGUC C AGCACACC | 4128 |
| 3669 | AGGUGUGC CUGAUGAG GCCGUUAGGC CGAA IGACACUC | 1350 | GAGUGUCC A GCACACCU | 4129 |
| 3672 | GGCAGGUG CUGAUGAG GCCGUUAGGC CGAA ICUGGACA | 1351 | UGUCCAGC A CACCUGCC | 4130 |
| 3674 | ACGGCAGG CUGAUGAG GCCGUUAGGC CGAA IUGCUGGA | 1352 | UCCAGCAC A CCUGCCGU | 4131 |
| 3676 | AGACGGCA CUGAUGAG GCCGUUAGGC CGAA IUGUGCUG | 1353 | CAGCACAC C UGCCGUCU | 4132 |
| 3677 | AAGACGGC CUGAUGAG GCCGUUAGGC CGAA IGUGUGCU | 1354 | AGCACACC U GCCGUCUU | 4133 |
| 3680 | GUGAAGAC CUGAUGAG GCCGUUAGGC CGAA ICAGGUGU | 1355 | ACACCUGC C GUCUUCAC | 4134 |
| 3684 | GGAAGUGA CUGAUGAG GCCGUUAGGC CGAA IACGGCAG | 1356 | CUGCCGUC U UCACUUCC | 4135 |
| 3687 | UGGGGAAG CUGAUGAG GCCGUUAGGC CGAA IAAGACGG | 1357 | CCGUCUUC A CUUCCCCA | 4136 |
| 3689 | UGUGGGGA CUGAUGAG GCCGUUAGGC CGAA IUGAAGAC | 1358 | GUCUUCAC U UCCCCACA | 4137 |
| 3692 | GCCUGUGG CUGAUGAG GCCGUUAGGC CGAA IAAGUGAA | 1359 | UUCACUUC C CCACAGGC | 4138 |
| 3693 | AGCCUGUG CUGAUGAG GCCGUUAGGC CGAA IGAAGUGA | 1360 | UCACUUCC C CACAGGCU | 4139 |
| 3694 | CAGCCUGU CUGAUGAG GCCGUUAGGC CGAA IGGAAGUG | 1361 | CACUUCCC C ACAGGCUG | 4140 |
| 3695 | CCAGCCUG CUGAUGAG GCCGUUAGGC CGAA IGGGAAGU | 1362 | ACUUCCCC A CAGGCUGG | 4141 |
| 3697 | CGCCAGCC CUGAUGAG GCCGUUAGGC CGAA IUGGGGAA | 1363 | UUCCCCAC A GGCUGGCG | 4142 |
| 3701 | CGAGCGCC CUGAUGAG GCCGUUAGGC CGAA ICCUGUGG | 1364 | CCACAGGC U GGCGCUCG | 4143 |
| 3707 | UGGAGCCG CUGAUGAG GCCGUUAGGC CGAA ICGCCAGC | 1365 | GCUGGCGC U CGGCUCCA | 4144 |
| 3712 | UGGGGUGG CUGAUGAG GCCGUUAGGC CGAA ICCGAGCG | 1366 | CGCUCGGC U CCACCCCA | 4145 |
| 3714 | CCUGGGGU CUGAUGAG GCCGUUAGGC CGAA IAGCCGAG | 1367 | CUCGGCUC C ACCCCAGG | 4146 |
| 3715 | CCCUGGGG CUGAUGAG GCCGUUAGGC CGAA IGAGCCGA | 1368 | UCGGCUCC A CCCCAGGG | 4147 |
| 3717 | GGCCCUGG CUGAUGAG GCCGUUAGGC CGAA IUGGAGCC | 1369 | GGCUCCAC C CCAGGGCC | 4148 |
| 3718 | UGGCCCUG CUGAUGAG GCCGUUAGGC CGAA IGUGGAGC | 1370 | GCUCCACC C CAGGGCCA | 4149 |
| 3719 | CUGGCCCU CUGAUGAG GCCGUUAGGC CGAA IGGUGGAG | 1371 | CUCCACCC C AGGGCCAG | 4150 |
| 3720 | GCUGGCCC CUGAUGAG GCCGUUAGGC CGAA IGGGUGGA | 1372 | UCCACCCC A GGGCCAGC | 4151 |
| 3725 | GAAAAGCU CUGAUGAG GCCGUUAGGC CGAA ICCCUGGG | 1373 | CCCAGGGC C AGCUUUUC | 4152 |
| 3726 | GGAAAAGC CUGAUGAG GCCGUUAGGC CGAA IGCCCUGG | 1374 | CCAGGGCC A GCUUUUCC | 4153 |
| 3729 | UGAGGAAA CUGAUGAG GCCGUUAGGC CGAA ICUGGCCC | 1375 | GGGCCAGC U UUUCCUCA | 4154 |
| 3734 | CCUGGUGA CUGAUGAG GCCGUUAGGC CGAA IAAAAGCU | 1376 | AGCUUUUC C UCACCAGG | 4155 |
| 3735 | UCCUGGUG CUGAUGAG GCCGUUAGGC CGAA IGAAAAGC | 1377 | GCUUUUCC U CACCAGGA | 4156 |
| 3737 | GCUCCUGG CUGAUGAG GCCGUUAGGC CGAA IAGGAAAA | 1378 | UUUUCCUC A CCAGGAGC | 4157 |
| 3739 | GGGCUCCU CUGAUGAG GCCGUUAGGC CGAA IUGAGGAA | 1379 | UUCCUCAC C AGGAGCCC | 4158 |
| 3740 | CGGGCUCC CUGAUGAG GCCGUUAGGC CGAA IGUGAGGA | 1380 | UCCUCACC A GGAGCCCG | 4159 |
| 3746 | GGAAGCCG CUGAUGAG GCCGUUAGGC CGAA ICUCCUGG | 1381 | CCAGGAGC C CGGCUUCC | 4160 |
| 3747 | UGGAAGCC CUGAUGAG GCCGUUAGGC CGAA IGCUCCUG | 1382 | CAGGAGCC C GGCUUCCA | 4161 |
| 3751 | GGAGUGGA CUGAUGAG GCCGUUAGGC CGAA ICCGGGCU | 1383 | AGCCCGGC U UCCACUCC | 4162 |
| 3754 | UGGGGAGU CUGAUGAG GCCGUUAGGC CGAA IAAGCCGG | 1384 | CCGGCUUC C ACUCCCCA | 4163 |
| 3755 | GUGGGGAG CUGAUGAG GCCGUUAGGC CGAA IGAAGCCG | 1385 | CGGCUUCC A CUCCCCAC | 4164 |
| 3757 | AUGUGGGG CUGAUGAG GCCGUUAGGC CGAA IUGGAAGC | 1386 | GCUUCCAC U CCCCACAU | 4165 |
| 3759 | CUAUGUGG CUGAUGAG GCCGUUAGGC CGAA IAGUGGAA | 1387 | UUCCACUC C CCACAUAG | 4166 |
| 3760 | CCUAUGUG CUGAUGAG GCCGUUAGGC CGAA IGAGUGGA | 1388 | UCCACUCC C CACAUAGG | 4167 |
| 3761 | UCCUAUGU CUGAUGAG GCCGUUAGGC CGAA IGGAGUGG | 1389 | CCACUCCC C ACAUAGGA | 4168 |
| 3762 | UUCCUAUG CUGAUGAG GCCGUUAGGC CGAA IGGGAGUG | 1390 | CACUCCCC A CAUAGGAA | 4169 |
| 3764 | UAUUCCUA CUGAUGAG GCCGUUAGGC CGAA IUGGGGAG | 1391 | CUCCCCAC A UAGGAAUA | 4170 |
| 3776 | CUGGGGAU CUGAUGAG GCCGUUAGGC CGAA IACUAUUC | 1392 | GAAUAGUC C AUCCCCAG | 4171 |
| 3777 | UCUGGGGA CUGAUGAG GCCGUUAGGC CGAA IGACUAUU | 1393 | AAUAGUCC A UCCCCAGA | 4172 |
| 3780 | GAAUCUGG CUGAUGAG GCCGUUAGGC CGAA IAUGGACU | 1394 | AGUCCAUC C CCAGAUUC | 4173 |
| 3781 | CGAAUCUG CUGAUGAG GCCGUUAGGC CGAA IGAUGGAC | 1395 | GUCCAUCC C CAGAUUCG | 4174 |
| 3782 | GCGAAUCU CUGAUGAG GCCGUUAGGC CGAA IGGAUGGA | 1396 | UCCAUCCC C AGAUUCGC | 4175 |
| 3783 | GGCGAAUC CUGAUGAG GCCGUUAGGC CGAA IGGGAUGG | 1397 | CCAUCCCC A GAUUCGCC | 4176 |
| 3791 | UGAACAAU CUGAUGAG GCCGUUAGGC CGAA ICGAAUCU | 1398 | AGAUUCGC C AUUGUUCA | 4177 |
| 3792 | GUGAACAA CUGAUGAG GCCGUUAGGC CGAA IGCGAAUC | 1399 | GAUUCGCC A UUGUUCAC | 4178 |
| 3799 | GCGAGGGG CUGAUGAG GCCGUUAGGC CGAA IAACAAUG | 14P0 | CAUUGUUC A CCCCUCGC | 4179 |
| 3801 | GGGCGAGG CUGAUGAG GCCGUUAGGC CGAA IUGAACAA | 1401 | UUGUUCAC C CCUCGCCC | 4180 |
| 3802 | AGGGCGAG CUGAUGAG GCCGUUAGGC CGAA IGUGAACA | 1402 | UGUUCACC C CUCGCCCU | 4181 |
| 3803 | CAGGGCGA CUGAUGAG GCCGUUAGGC CGAA IGGUGAAC | 1403 | GUUCACCC C UCGCCCUG | 4182 |
| 3804 | GCAGGGCG CUGAUGAG GCCGUUAGGC CGAA IGGGUGAA | 1404 | UUCACCCC U CGCCCUGC | 4183 |
| 3808 | GAGGGCAG CUGAUGAG GCCGUUAGGC CGAA ICGAGGGG | 1405 | CCCCUCGC C CUGCCCUC | 4184 |
| 3809 | GGAGGGCA CUGAUGAG GCCGUUAGGC CGAA IGCGAGGG | 1406 | CCCUCGCC C UGCCCUCC | 4185 |
| 3810 | AGGAGGGC CUGAUGAG GCCGUUAGGC CGAA IGGCGAGG | 1407 | CCUCGCCC U GCCCUCCU | 4186 |
| 3813 | CAAAGGAG CUGAUGAG GCCGUUAGGC CGAA ICAGGGCG | 1408 | CGCCCUGC C CUCCUUUG | 4187 |
| 3814 | GCAAAGGA CUGAUGAG GCCGUUAGGC CGAA IGCAGGGC | 1409 | GCCCUGCC C UCCUUUGC | 4188 |
| 3815 | GGCAAAGG CUGAUGAG GCCGUUAGGC CGAA IGGCAGGG | 1410 | CCCUGCCC U CCUUUGCC | 4189 |
| 3817 | AAGGCAAA CUGAUGAG GCCGUUAGGC CGAA IAGGGCAG | 1411 | CUGCCCUC C UUUGCCUU | 4190 |
| 3818 | GAAGGCAA CUGAUGAG GCCGUUAGGC CGAA IGAGGGCA | 1412 | UGCCCUCC U UUGCCUUC | 4191 |
| 3823 | GGGUGGAA CUGAUGAG GCCGUUAGGC CGAA ICAAAGGA | 1413 | UCCUUUGC C UUCCACCC | 4192 |
| 3824 | GGGGUGGA CUGAUGAG GCCGUUAGGC CGAA IGCAAAGG | 1414 | CCUUUGCC U UCCACCCC | 4193 |
| 3827 | GUGGGGGU CUGAUGAG GCCGUUAGGC CGAA IAAGGCAA | 1415 | UUGCCUUC C ACCCCCAC | 4194 |
| 3828 | GGUGGGGG CUGAUGAG GCCGUUAGGC CGAA IGAAGGCA | 1416 | UGCCUUCC A CCCCCACC | 4195 |
| 3830 | AUGGUGGG CUGAUGAG GCCGUUAGGC CGAA IUGGAAGG | 1417 | CCUUCCAC C CCCACCAU | 4196 |
| 3831 | GAUGGUGG CUGAUGAG GCCGUUAGGC CGAA IGUGGAAG | 1418 | CUUCCACC C CCACCAUC | 4197 |
| 3832 | GGAUGGUG CUGAUGAG GCCGUUAGGC CGAA IGGUGGAA | 1419 | UUCCACCC C CACCAUCC | 4198 |
| 3833 | UGGAUGGU CUGAUGAG GCCGUUAGGC CGAA IGGGUGGA | 1420 | UCCACCCC C ACCAUCCA | 4199 |
| 3834 | CUGGAUGG CUGAUGAG GCCGUUAGGC CGAA IGGGGUGG | 1421 | CCACCCCC A CCAUCCAG | 4200 |
| 3836 | ACCUGGAU CUGAUGAG GCCGUUAGGC CGAA IUGGGGGU | 1422 | ACCCCCAC C AUCCAGGU | 4201 |
| 3837 | CACCUGGA CUGAUGAG GCCGUUAGGC CGAA IGUGGGGG | 1423 | CCCCCACC A UCCAGGUG | 4202 |
| 3840 | CUCCACCU CUGAUGAG GCCGUUAGGC CGAA IAUGGUGG | 1424 | CCACCAUC C AGGUGGAG | 4203 |
| 3841 | UCUCCACC CUGAUGAG GCCGUUAGGC CGAA IGAUGGUG | 1425 | CACCAUCC A GGUGGAGA | 4204 |
| 3851 | CUUCUCAG CUGAUGAG GCCGUUAGGC CGAA IUCUCCAC | 1426 | GUGGAGAC C CUGAGAAG | 4205 |
| 3852 | CCUUCUCA CUGAUGAG GCCGUUAGGC CGAA IGUCUCCA | 1427 | UGGAGACC C UGAGAAGG | 4206 |
| 3853 | UCCUUCUC CUGAUGAG GCCGUUAGGC CGAA IGGUCUCC | 1428 | GGAGACCC U GAGAAGGA | 4207 |
| 3863 | GCUCCCAG CUGAUGAG GCCGUUAGGC CGAA IUCCUUCU | 1429 | AGAAGGAC C CUGGGAGC | 4208 |
| 3864 | AGCUCCCA CUGAUGAG GCCGUUAGGC CGAA IGUCCUUC | 1430 | GAAGGACC C UGGGAGCU | 4209 |
| 3865 | GAGCUCCC CUGAUGAG GCCGUUAGGC CGAA IGGUCCUU | 1431 | AAGGACCC U GGGAGCUC | 4210 |
| 3872 | AUUCCCAG CUGAUGAG GCCGUUAGGC CGAA ICUCCCAG | 1432 | CUGGGAGC U CUGGGAAU | 4211 |
| 3874 | AAAUUCCC CUGAUGAG GCCGUUAGGC CGAA IAGCUCCC | 1433 | GGGAGCUC U GGGAAAUU | 4212 |
| 3891 | ACACCUUU CUGAUGAG GCCGUUAGGC CGAA IUCACUCC | 1434 | GGAGUGAC C AAAGGUGU | 4213 |
| 3892 | CACACCUU CUGAUGAG GCCGUUAGGC CGAA IGUCACUC | 1435 | GAGUGACC A AAGGUGUG | 4214 |
| 3902 | GUGUACAG CUGAUGAG GCCGUUAGGC CGAA ICACACCU | 1436 | AGGUGUGC C CUGUACAC | 4215 |
| 3903 | UGUGUACA CUGAUGAG GCCGUUAGGC CGAA IGCACACC | 1437 | GGUGUGCC C UGUACACA | 4216 |
| 3904 | CUGUGUAC CUGAUGAG GCCGUUAGGC CGAA IGGCACAC | 1438 | GUGUGCCC U GUACACAG | 4217 |
| 3909 | CUCGCCUG CUGAUGAG GCCGUUAGGC CGAA IUACAGGG | 1439 | CCCUGUAC A CAGGCGAG | 4218 |
| 3911 | UCCUCGCC CUGAUGAG GCCGUUAGGC CGAA IUGUACAG | 1440 | CUGUACAC A GGCGAGGA | 4219 |
| 3921 | AGGUGCAG CUGAUGAG GCCGUUAGGC CGAA IUCCUCGC | 1441 | GCGAGGAC C CUGCACCU | 4220 |
| 3922 | CAGGUGCA CUGAUGAG GCCGUUAGGC CGAA IGUCCUCG | 1442 | CGAGGACC C UGCACCUG | 4221 |
| 3923 | CCAGGUGC CUGAUGAG GCCGUUAGGC CGAA IGGUCCUC | 1443 | GAGGACCC U GCACCUGG | 4222 |
| 3926 | CAUCCAGG CUGAUGAG GCCGUUAGGC CGAA ICAGGGUC | 1444 | GACCCUGC A CCUGGAUG | 4223 |
| 3928 | CCCAUCCA CUGAUGAG GCCGUUAGGC CGAA IUGCAGGG | 1445 | CCCUGCAC C UGGAUGGG | 4224 |
| 3929 | CCCCAUCC CUGAUGAG GCCGUUAGGC CGAA IGUGCAGG | 1446 | CCUGCACC U GGAUGGGG | 4225 |
| 3941 | ACCCACAG CUGAUGAG GCCGUUAGGC CGAA IACCCCCA | 1447 | UGGGGGUC C CUGUGGGU | 4226 |
| 3942 | GACCCACA CUGAUGAG GCCGUUAGGC CGAA IGACCCCC | 1448 | GGGGGUCC C UGUGGGUC | 4227 |
| 3943 | UGACCCAC CUGAUGAG GCCGUUAGGC CGAA IGGACCCC | 1449 | GGGGUCCC U GUGGGUCA | 4228 |
| 3951 | CCCCAAUU CUGAUGAG GCCGUUAGGC CGAA IACCCACA | 1450 | UGUGGGUC A AAUUGGGG | 4229 |
| 3968 | ACUCCCAC CUGAUGAG GCCGUUAGGC CGAA ICACCUCC | 1451 | GGAGGUGC U GUGGGAGU | 4230 |
| 3984 | AUAUAUUC CUGAUGAG GCCGUUAGGC CGAA IUAUUUUA | 1452 | UAAAAUAC U GAAUAUAU | 4231 |
| 4002 | UUCAAAAC CUGAUGAG GCCGUUAGGC CGAA IAAAAACU | 1453 | AGUUUUUC A GUUUUGAA | 4232 |

Stem Length = 8.
Core Sequence = CUGAUGAG GCCGUUAGGC CGAA,
I = Inosine nucleotide
Seq1 = TERT (Homo sapiens telomerase reverse transcriptase (TERT) mRNA, 4015 bp); Nakamura et al., Science 277 (5328), 955-959 (1997)

[0184] TABLE V

Human telomerase reverse transcriptase (TERT) G-Cleaver Ribozyme and
Target Sequence

| | | | |
|---|---|---|---|
| nt. | | Seq ID | |
| Position | Substrate Sequence | Nos | Ribozyme Sequence |

| | | | | |
|---|---|---|---|---|
| 16 | GCUGCGUCCU G CUGCG | 1454 | CGCAG UGAUGGCAUGCACUAUGCGCG AGGACGCAGC | 4233 |
| 19 | GCGUCCUGCU G CGCAC | 1455 | GUGCG UGAUGGCAUGCACUAUGCGCG AGCAGGACGC | 4234 |
| 21 | GUCCUGCUGC G CACGU | 1456 | ACGUG UGAUGGCAUGCACUAUGCGCG GCAGCAGGAC | 4235 |
| 53 | GGCCACCCCC G CGAUG | 1457 | CAUCG UGAUGGCAUGCACUAUGCGCG GGGGGUGGCC | 4236 |
| 55 | CCACCCCCGC G AUGCC | 1458 | GGCAU UGAUGGCAUGCACUAUGCGCG GCGGGGGUGG | 4237 |
| 58 | CCCCCGCGAU G CCGCG | 1459 | CGCGG UGAUGGCAUGCACUAUGCGCG AUCGCGGGGG | 4238 |
| 61 | CCGCGAUGCC G CGCGC | 1460 | GCGCG UGAUGGCAUGCACUAUGCGCG GGCAUCGCGG | 4239 |
| 63 | GCGAUGCCGC G CGCUC | 1461 | GAGCG UGAUGGCAUGCACUAUGCGCG GCGGCAUCGC | 4240 |
| 65 | GAUGCCGCGC G CUCCC | 1462 | GGGAG UGAUGGCAUGCACUAUGCGCG GCGCGGCAUC | 4241 |
| 72 | CGCGCUCCCC G CUGCC | 1463 | GGCAG UGAUGGCAUGCACUAUGCGCG GGGGAGCGCG | 4242 |
| 75 | GCUCCCCGCU G CCGAG | 1464 | CUCGG UGAUGGCAUGCACUAUGCGCG AGCGGGGAGC | 4243 |
| 78 | CCCCGCUGCC G AGCCG | 1465 | CGGCU UGAUGGCAUGCACUAUGCGCG GGCAGCGGGG | 4244 |
| 85 | GCCGAGCCGU G CGCUC | 1466 | GAGCG UGAUGGCAUGCACUAUGCGCG ACGGCUCGGC | 4245 |
| 87 | CGAGCCGUGC G CUCCC | 1467 | GGGAG UGAUGGCAUGCACUAUGCGCG GCACGGCUCG | 4246 |
| 94 | UGCGCUCCCU G CUGCG | 1468 | CGCAG UGAUGGCAUGCACUAUGCGCG AGGGAGCGCA | 4247 |
| 97 | GCUCCCUGCU G CGCAG | 1469 | CUGCG UGAUGGCAUGCACUAUGCGCG AGCAGGGAGC | 4248 |
| 99 | UCCCUGCUGC G CAGCC | 1470 | GGCUG UGAUGGCAUGCACUAUGCGCG GCAGCAGGGA | 4249 |
| 111 | AGCCACUACC G CGAGG | 1471 | CCUCG UGAUGGCAUGCACUAUGCGCG GGUAGUGGCU | 4250 |
| 113 | CCACUACCGC G AGGUG | 1472 | CACCU UGAUGGCAUGCACUAUGCGCG GCGGUAGUGG | 4251 |
| 118 | ACCGCGAGGU G CUGCC | 1473 | GGCAG UGAUGGCAUGCACUAUGCGCG ACCUCGCGGU | 4252 |
| 121 | GCGAGGUGCU G CCGCU | 1474 | AGCGG UGAUGGCAUGCACUAUGCGCG AGCACCUCGC | 4253 |
| 124 | AGGUGCUGCC G CUGGC | 1475 | GCCAG UGAUGGCAUGCACUAUGCGCG GGCAGCACCU | 4254 |
| 139 | CCACGUUCGU G CGGCG | 1476 | CGCCG UGAUGGCAUGCACUAUGCGCG ACGAACGUGG | 4255 |
| 144 | UUCGUGCGGC G CCUGG | 1477 | CCAGG UGAUGGCAUGCACUAUGCGCG GCCGCACGAA | 4256 |
| 172 | GGCGGCUGGU G CAGCG | 1478 | CGCUG UGAUGGCAUGCACUAUGCGCG ACCAGCCGCC | 4257 |
| 177 | CUGGUGCAGC G CGGGG | 1479 | CCCCG UGAUGGCAUGCACUAUGCGCG GCUGCACCAG | 4258 |
| 198 | GCGGCUUUCC G CGCGC | 1480 | GCGCG UGAUGGCAUGCACUAUGCGCG GGAAAGCCGC | 4259 |
| 200 | GGCUUUCCGC G CGCUG | 1481 | CAGCG UGAUGGCAUGCACUAUGCGCG GCGGAAAGCC | 4260 |
| 202 | CUUUCCGCGC G CUGGU | 1482 | ACCAG UGAUGGCAUGCACUAUGCGCG GCGCGGAAAG | 4261 |
| 216 | GUGGCCCAGU G CCUGG | 1483 | CCAGG UGAUGGCAUGCACUAUGCGCG ACUGGGCCAC | 4262 |
| 223 | AGUGCCUGGU G UGCGU | 1484 | ACGCA UGAUGGCAUGCACUAUGCGCG ACCAGGCACU | 4263 |
| 225 | UGCCUGGUGU G CGUGC | 1485 | GCACG UGAUGGCAUGCACUAUGCGCG ACACCAGGCA | 4264 |
| 229 | UGGUGUGCGU G CCCUG | 1486 | CAGGG UGAUGGCAUGCACUAUGCGCG ACGCACACCA | 4265 |
| 239 | GCCCUGGGAC G CACGG | 1487 | CCGUG UGAUGGCAUGCACUAUGCGCG GUCCCAGGGC | 4266 |
| 247 | ACGCACGGCC G CCCCC | 1488 | GGGGG UGAUGGCAUGCACUAUGCGCG GGCCGUGCGU | 4267 |
| 254 | GCCGCCCCCC G CCGCC | 1489 | GGCGG UGAUGGCAUGCACUAUGCGCG GGGGGGCGGC | 4268 |
| 257 | GCCCCCCGCC G CCCCC | 1490 | GGGGG UGAUGGCAUGCACUAUGCGCG GGCGGGGGGC | 4269 |
| 270 | CCCUCCUUCC G CCAGG | 1491 | CCUGG UGAUGGCAUGCACUAUGCGCG GGAAGGAGGG | 4270 |
| 277 | UCCGCCAGGU G UCCUG | 1492 | CAGGA UGAUGGCAUGCACUAUGCGCG ACCUGGCGGA | 4271 |
| 282 | CAGGUGUCCU G CCUGA | 1493 | UCAGG UGAUGGCAUGCACUAUGCGCG AGGACACCUG | 4272 |
| 286 | UGUCCUGCCU G AAGGA | 1494 | UCCUU UGAUGGCAUGCACUAUGCGCG AGGCAGGACA | 4273 |
| 303 | CUGGUGGCCC G AGUGC | 1495 | GCACU UGAUGGCAUGCACUAUGCGCG GGGCCACCAG | 4274 |
| 307 | UGGCCCGAGU G CUGCA | 1496 | UGCAG UGAUGGCAUGCACUAUGCGCG ACUCGGGCCA | 4275 |
| 310 | CCCGAGUGCU G CAGAG | 1497 | CUCUG UGAUGGCAUGCACUAUGCGCG AGCACUCGGG | 4276 |
| 319 | UGCAGAGGCU G UGCGA | 1498 | UCGCA UGAUGGCAUGCACUAUGCGCG AGCCUCUGCA | 4277 |
| 321 | CAGAGGCUGU G CGAGC | 1499 | GCUCG UGAUGGCAUGCACUAUGCGCG ACAGCCUCUG | 4278 |
| 323 | GAGGCUGUGC G AGCGC | 1500 | GCGCU UGAUGGCAUGCACUAUGCGCG GCACAGCCUC | 4279 |
| 327 | CUGUGCGAGC G CGGCG | 1501 | CGCCG UGAUGGCAUGCACUAUGCGCG GCUCGCACAG | 4280 |
| 332 | CGAGCGCGGC G CGAAG | 1502 | CUUCG UGAUGGCAUGCACUAUGCGCG GCCGCGCUCG | 4281 |
| 334 | AGCGCGGCGC G AAGAA | 1503 | UUCUU UGAUGGCAUGCACUAUGCGCG GCGCCGCGCU | 4282 |
| 343 | CGAAGAACGU G CUGGC | 1504 | GCCAG UGAUGGCAUGCACUAUGCGCG ACGUUCUUCG | 4283 |
| 359 | CUUCGGCUUC G CGCUG | 1505 | CAGCG UGAUGGCAUGCACUAUGCGCG GAAGCCGAAG | 4284 |
| 361 | UCGGCUUCGC G CUGCU | 1506 | AGCAG UGAUGGCAUGCACUAUGCGCG GCGAAGCCGA | 4285 |
| 364 | GCUUCGCGCU G CUGGA | 1507 | UCCAG UGAUGGCAUGCACUAUGCGCG AGCGCGAAGC | 4286 |
| 378 | GACGGGGCCC G CGGGG | 1508 | CCCCG UGAUGGCAUGCACUAUGCGCG GGGCCCCGUC | 4287 |
| 392 | GGGCCCCCCC G AGGCC | 1509 | GGCCU UGAUGGCAUGCACUAUGCGCG GGGGGGGCCC | 4288 |
| 412 | CCACCAGCGU G CGCAG | 1510 | CUGCG UGAUGGCAUGCACUAUGCGCG ACGCUGGUGG | 4289 |
| 414 | ACCAGCGUGC G CAGCU | 1511 | AGCUG UGAUGGCAUGCACUAUGCGCG GCACGCUGGU | 4290 |
| 424 | GCAGCUACCU G CCCAA | 1512 | UUGGG UGAUGGCAUGCACUAUGCGCG AGGUAGCUGC | 4291 |
| 436 | CCAACACGGU G ACCGA | 1513 | UCGGU UGAUGGCAUGCACUAUGCGCG ACCGUGUUGG | 4292 |
| 440 | CACGGUGACC G ACGCA | 1514 | UGCGU UGAUGGCAUGCACUAUGCGCG GGUCACCGUG | 4293 |
| 443 | GGUGACCGAC G CACUG | 1515 | CAGUG UGAUGGCAUGCACUAUGCGCG GUCGGUCACC | 4294 |
| 448 | CCGACGCACU G CGGGG | 1516 | CCCCG UGAUGGCAUGCACUAUGCGCG AGUGCGUCGG | 4295 |
| 472 | CGUGGGGGCU G CUGCU | 1517 | AGCAG UGAUGGCAUGCACUAUGCGCG AGCCCCCACG | 4296 |
| 475 | GGGGGCUGCU G CUGCG | 1518 | CGCAG UGAUGGCAUGCACUAUGCGCG AGCAGCCCCC | 4297 |
| 478 | GGCUGCUGCU G CGCCG | 1519 | CGGCG UGAUGGCAUGCACUAUGCGCG AGCAGCAGCC | 4298 |
| 480 | CUGCUGCUGC G CCGCG | 1520 | CGCGG UGAUGGCAUGCACUAUGCGCG GCAGCAGCAG | 4299 |
| 483 | CUGCUGCGCC G CGUGG | 1521 | CCACG UGAUGGCAUGCACUAUGCGCG GGCGCAGCAG | 4300 |
| 491 | CCGCGUGGGC G ACGAC | 1522 | GUCGU UGAUGGCAUGCACUAUGCGCG GCCCACGCGG | 4301 |
| 494 | CGUGGGCGAC G ACGUG | 1523 | CACGU UGAUGGCAUGCACUAUGCGCG GUCGCCCACG | 4302 |
| 499 | GCGACGACGU G CUGGU | 1524 | ACCAG UGAUGGCAUGCACUAUGCGCG ACGUCGUCGC | 4303 |
| 511 | UGGUUCACCU G CUGGC | 1525 | GCCAG UGAUGGCAUGCACUAUGCGCG AGGUGAACCA | 4304 |
| 519 | CUGCUGGCAC G CUGCG | 1526 | CGCAG UGAUGGCAUGCACUAUGCGCG GUGCCAGCAG | 4305 |
| 522 | CUGGCACGCU G CGCGC | 1527 | GCGCG UGAUGGCAUGCACUAUGCGCG AGCGUGCCAG | 4306 |
| 524 | GGCACGCUGC G CGCUC | 1528 | GAGCG UGAUGGCAUGCACUAUGCGCG GCAGCGUGCC | 4307 |
| 526 | CACGCUGCGC G CUCUU | 1529 | AAGAG UGAUGGCAUGCACUAUGCGCG GCGCAGCGUG | 4308 |
| 533 | CGCGCUCUUU G UGCUG | 1530 | CAGCA UGAUGGCAUGCACUAUGCGCG AAAGAGCGCG | 4309 |
| 535 | CGCUCUUUGU G CUGGU | 1531 | ACCAG UGAUGGCAUGCACUAUGCGCG ACAAAGAGCG | 4310 |
| 552 | GCUCCCAGCU G CGCCU | 1532 | AGGCG UGAUGGCAUGCACUAUGCGCG AGCUGGGAGC | 4311 |
| 554 | UCCCAGCUGC G CCUAC | 1533 | GUAGG UGAUGGCAUGCACUAUGCGCG GCAGCUGGGA | 4312 |
| 565 | CCUACCAGGU G UGCGG | 1534 | CCGCA UGAUGGCAUGCACUAUGCGCG ACCUGGUAGG | 4313 |
| 567 | UACCAGGUGU G CGGGC | 1535 | GCCCG UGAUGGCAUGCACUAUGCGCG ACACCUGGUA | 4314 |
| 574 | UGUGCGGGCC G CCGCU | 1536 | AGCGG UGAUGGCAUGCACUAUGCGCG GGCCCGCACA | 4315 |
| 577 | GCGGGCCGCC G CUGUA | 1537 | UACAG UGAUGGCAUGCACUAUGCGCG GGCGGCCCGC | 4316 |
| 580 | GGCCGCCGCU G UACCA | 1538 | UGGUA UGAUGGCAUGCACUAUGCGCG AGCGGCGGCC | 4317 |
| 593 | CCAGCUCGGC G CUGCC | 1539 | GGCAG UGAUGGCAUGCACUAUGCGCG GCCGAGCUGG | 4318 |
| 596 | GCUCGGCGCU G CCACU | 1540 | AGUGG UGAUGGCAUGCACUAUGCGCG AGCGCCGAGC | 4319 |
| 616 | CCCGGCCCCC G CCACA | 1541 | UGUGG UGAUGGCAUGCACUAUGCGCG GGGGGCCGGG | 4320 |
| 623 | CCCGCCACAC G CUAGU | 1542 | ACUAG UGAUGGCAUGCACUAUGCGCG GUGUGGCGGG | 4321 |
| 636 | AGUGGACCCC G AAGGC | 1543 | GCCUU UGAUGGCAUGCACUAUGCGCG GGGGUCCACU | 4322 |
| 651 | CGUCUGGGAU G CGAAC | 1544 | GUUCG UGAUGGCAUGCACUAUGCGCG AUCCCAGACG | 4323 |
| 653 | UCUGGGAUGC G AACGG | 1545 | CCGUU UGAUGGCAUGCACUAUGCGCG GCAUCCCAGA | 4324 |
| 703 | CCCUGGGCCU G CCAGC | 1546 | GCUGG UGAUGGCAUGCACUAUGCGCG AGGCCCAGGG | 4325 |
| 716 | AGCCCCGGGU G CGAGG | 1547 | CCUCG UGAUGGCAUGCACUAUGCGCG ACCCGGGGCU | 4326 |
| 718 | CCCCGGGUGC G AGGAG | 1548 | CUCCU UGAUGGCAUGCACUAUGCGCG GCACCCGGGG | 4327 |
| 726 | GCGAGGAGGC G CGGGG | 1549 | CCCCG UGAUGGCAUGCACUAUGCGCG GCCUCCUCGC | 4328 |
| 737 | CGGGGGCAGU G CCAGC | 1550 | GCUGG UGAUGGCAUGCACUAUGCGCG ACUGCCCCCG | 4329 |
| 744 | AGUGCCAGCC G AAGUC | 1551 | GACUU UGAUGGCAUGCACUAUGCGCG GGCUGGCACU | 4330 |
| 751 | GCCGAAGUCU G CCGUU | 1552 | AACGG UGAUGGCAUGCACUAUGCGCG AGACUUCGGC | 4331 |
| 757 | GUCUGCCGUU G CCCAA | 1553 | UUGGG UGAUGGCAUGCACUAUGCGCG AACGGCAGAC | 4332 |
| 779 | CAGGCGUGGC G CUGCC | 1554 | GGCAG UGAUGGCAUGCACUAUGCGCG GCCACGCCUG | 4333 |
| 782 | GCGUGGCGCU G CCCCU | 1555 | AGGGG UGAUGGCAUGCACUAUGCGCG AGCGCCACGC | 4334 |
| 788 | CGCUGCCCCU G AGCCG | 1556 | CGGCU UGAUGGCAUGCACUAUGCGCG AGGGGCAGCG | 4335 |
| 802 | CGGAGCGGAC G CCCGU | 1557 | ACGGG UGAUGGCAUGCACUAUGCGCG GUCCGCUCCG | 4336 |
| 841 | CGGGCAGGAC G CGUGG | 1558 | CCACG UGAUGGCAUGCACUAUGCGCG GUCCUGCCCG | 4337 |
| 850 | CGCGUGGACC G AGUGA | 1559 | UCACU UGAUGGCAUGCACUAUGCGCG GGUCCACGCG | 4338 |
| 854 | UGGACCGAGU G ACCGU | 1560 | ACGGU UGAUGGCAUGCACUAUGCGCG ACUCGGUCCA | 4339 |
| 867 | CGUGGUUUCU G UGUGG | 1561 | CCACA UGAUGGCAUGCACUAUGCGCG AGAAACCACG | 4340 |
| 869 | UGGUUUCUGU G UGGUG | 1562 | CACCA UGAUGGCAUGCACUAUGCGCG ACAGAAACCA | 4341 |
| 874 | UCUGUGUGGU G UCACC | 1563 | GGUGA UGAUGGCAUGCACUAUGCGCG ACCACACAGA | 4342 |
| 881 | GGUGUCACCU G CCAGA | 1564 | UCUGG UGAUGGCAUGCACUAUGCGCG AGGUGACACC | 4343 |
| 890 | UGCCAGACCC G CCGAA | 1565 | UUCGG UGAUGGCAUGCACUAUGCGCG GGGUCUGGCA | 4344 |
| 893 | CAGACCCGCC G AAGAA | 1566 | UUCUU UGAUGGCAUGCACUAUGCGCG GGCGGGUCUG | 4345 |
| 917 | UUUGGAGGGU G CGCUC | 1567 | GAGCG UGAUGGCAUGCACUAUGCGCG ACCCUCCAAA | 4346 |
| 919 | UGGAGGGUGC G CUCUC | 1568 | GAGAG UGAUGGCAUGCACUAUGCGCG GCACCCUCCA | 4347 |
| 931 | UCUCUGGCAC G CGCCA | 1569 | UGGCG UGAUGGCAUGCACUAUGCGCG GUGCCAGAGA | 4348 |
| 933 | UCUGGCACGC G CCACU | 1570 | AGUGG UGAUGGCAUGCACUAUGCGCG GCGUGCCAGA | 4349 |
| 957 | UCCGUGGGCC G CCAGC | 1571 | GCUGG UGAUGGCAUGCACUAUGCGCG GGCCCACGGA | 4350 |
| 968 | CCAGCACCAC G CGGGC | 1572 | GCCCG UGAUGGCAUGCACUAUGCGCG GUGGUGCUGG | 4351 |
| 988 | CAUCCACAUC G CGGCC | 1573 | GGCCG UGAUGGCAUGCACUAUGCGCG GAUGUGGAUG | 4352 |
| 1012 | CCUGGGACAC G CCUUG | 1574 | CAAGG UGAUGGCAUGCACUAUGCGCG GUGUCCCAGG | 4353 |
| 1017 | GACACGCCUU G UCCCC | 1575 | GGGGA UGAUGGCAUGCACUAUGCGCG AAGGCGUGUC | 4354 |
| 1027 | GUCCCCCGGU G UACGC | 1576 | GCGUA UGAUGGCAUGCACUAUGCGCG ACCGGGGGAC | 4355 |
| 1031 | CCCGGUGUAC G CCGAG | 1577 | CUCGG UGAUGGCAUGCACUAUGCGCG GUACACCGGG | 4356 |
| 1034 | GGUGUACGCC G AGACC | 1578 | GGUCU UGAUGGCAUGCACUAUGCGCG GGCGUACACC | 4357 |
| 1064 | CUCCUCAGGC G ACAAG | 1579 | CUUGU UGAUGGCAUGCACUAUGCGCG GCCUGAGGAG | 4358 |
| 1078 | AGGAGCAGCU G CGGCC | 1580 | GGCCG UGAUGGCAUGCACUAUGCGCG AGCUGCUCCU | 4359 |
| 1105 | UCAGCUCUCU G AGGCC | 1581 | GGCCU UGAUGGCAUGCACUAUGCGCG AGAGAGCUGA | 4360 |
| 1117 | GGCCCAGCCU G ACUGG | 1582 | CCAGU UGAUGGCAUGCACUAUGCGCG AGGCUGGGCC | 4361 |
| 1124 | CCUGACUGGC G CUCGG | 1583 | CCGAG UGAUGGCAUGCACUAUGCGCG GCCAGUCAGG | 4362 |
| 1171 | GGCCCUGGAU G CCAGG | 1584 | CCUGG UGAUGGCAUGCACUAUGCGCG AUCCAGGGCC | 4363 |
| 1185 | GGGACUCCCC G CAGGU | 1585 | ACCUG UGAUGGCAUGCACUAUGCGCG GGGGAGUCCC | 4364 |
| 1192 | CCCGCAGGUU G CCCCG | 1586 | CGGGG UGAUGGCAUGCACUAUGCGCG AACCUGCGGG | 4365 |
| 1197 | AGGUUGCCCC G CCUGC | 1587 | GCAGG UGAUGGCAUGCACUAUGCGCG GGGGCAACCU | 4366 |
| 1201 | UGCCCCGCCU G CCCCA | 1588 | UGGGG UGAUGGCAUGCACUAUGCGCG AGGCGGGGCA | 4367 |
| 1209 | CUGCCCCAGC G CUACU | 1589 | AGUAG UGAUGGCAUGCACUAUGCGCG GCUGGGGCAG | 4368 |
| 1222 | ACUGGCAAAU G CGGCC | 1590 | GGCCG UGAUGGCAUGCACUAUGCGCG AUUUGCCAGU | 4369 |
| 1231 | UGCGGCCCCU G UUUCU | 1591 | AGAAA UGAUGGCAUGCACUAUGCGCG AGGGGCCGCA | 4370 |
| 1243 | UUCUGGAGCU G CUUGG | 1592 | CCAAG UGAUGGCAUGCACUAUGCGCG AGCUCCAGAA | 4371 |
| 1256 | UGGGAACCAC G CGCAG | 1593 | CUGCG UGAUGGCAUGCACUAUGCGCG GUGGUUCCCA | 4372 |
| 1258 | GGAACCACGC G CAGUG | 1594 | CACUG UGAUGGCAUGCACUAUGCGCG GCGUGGUUCC | 4373 |
| 1263 | CACGCGCAGU G CCCCU | 1595 | AGGGG UGAUGGCAUGCACUAUGCGCG ACUGCGCGUG | 4374 |
| 1276 | CCUACGGGGU G CUCCU | 1596 | AGGAG UGAUGGCAUGCACUAUGCGCG ACCCCGUAGG | 4375 |
| 1288 | UCCUCAAGAC G CACUG | 1597 | CAGUG UGAUGGCAUGCACUAUGCGCG GUCUUGAGGA | 4376 |
| 1293 | AAGACGCACU G CCCGC | 1598 | GCGGG UGAUGGCAUGCACUAUGCGCG AGUGCGUCUU | 4377 |
| 1297 | CGCACUGCCC G CUGCG | 1599 | CGCAG UGAUGGCAUGCACUAUGCGCG GGGCAGUGCG | 4378 |
| 1300 | ACUGCCCGCU G CGAGC | 1600 | GCUCG UGAUGGCAUGCACUAUGCGCG AGCGGGCAGU | 4379 |
| 1302 | UGCCCGCUGC G ACCUG | 1601 | CAGCU UGAUGGCAUGCACUAUGCGCG GCAGCGGGCA | 4380 |
| 1307 | GCUGCGAGCU G CGGUC | 1602 | GACCG UGAUGGCAUGCACUAUGCGCG AGCUCGCAGC | 4381 |
| 1328 | AGCAGCCGGU G UCUGU | 1603 | ACAGA UGAUGGCAUGCACUAUGCGCG ACCGGCUGCU | 4382 |
| 1332 | GCCGGUGUCU G UGCCC | 1604 | GGGCA UGAUGGCAUGCACUAUGCGCG AGACACCGGC | 4383 |
| 1334 | CGGUGUCUGU G CCCGG | 1605 | CCGGG UGAUGGCAUGCACUAUGCGCG ACAGACACCG | 4384 |
| 1358 | CCAGGGCUCU G UGGCG | 1606 | CGCCA UGAUGGCAUGCACUAUGCGCG AGAGCCCUGG | 4385 |
| 1370 | GGCGGCCCCC G AGGAG | 1607 | CUCCU UGAUGGCAUGCACUAUGCGCG GGGGGCCGCC | 4386 |
| 1395 | GACCCCCGUC C CCUGG | 1608 | CCAGG UGAUGGCAUGCACUAUGCGCG GACGGGGGUC | 4387 |
| 1402 | GUCGCCUGGU G CAGCU | 1609 | ACCUG UGAUGGCAUGCACUAUGCGCG ACCAGGCGAC | 4388 |
| 1408 | UGGUGCAGCU G CUCCG | 1610 | CGGAG UGAUGGCAUGCACUAUGCGCG AGCUGCACCA | 4389 |
| 1413 | CAGCUGCUCC G CCAGC | 1611 | GCUGG UGAUGGCAUGCACUAUGCGCG GGAGCAGCUG | 4390 |
| 1438 | CCUGGCAGGU G UACGG | 1612 | CCGUA UGAUGGCAUGCACUAUGCGCG ACCUGCCAGG | 4391 |
| 1450 | ACGGCUUCGU G CGGGC | 1613 | GCCCG UGAUGGCAUGCACUAUGCGCG ACGAAGCCGU | 4392 |
| 1458 | GUGCGGGCCU G CCUGC | 1614 | GCAGG UGAUGGCAUGCACUAUGCGCG AGGCCCGCAC | 4393 |
| 1462 | GGGCCUGCCU G CGCCG | 1615 | CGGCG UGAUGGCAUGCACUAUGCGCG AGGCAGGCCC | 4394 |
| 1464 | GCCUGCCUGC G CCGGC | 1616 | GCCGG UGAUGGCAUGCACUAUGCGCG GCAGGCAGGC | 4395 |
| 1474 | GCCGGCUGGU G CCCCC | 1617 | GGGGG UGAUGGCAUGCACUAUGCGCG ACCAGCCGGC | 4396 |
| 1505 | CAGGCACAAC G AACGC | 1618 | GCGUU UGAUGGCAUGCACUAUGCGCG GUUGUGCCUG | 4397 |
| 1509 | CACAACGAAC G CCGCU | 1619 | AGCGG UGAUGGCAUGCACUAUGCGCG GUUCGUUGUG | 4398 |
| 1512 | AACGAACGCC G CUUCC | 1620 | GGAAG UGAUGGCAUGCACUAUGCGCG GGCGUUCGUU | 4399 |
| 1556 | GGGGAAGCAU G CCAAG | 1621 | CUUGG UGAUGGCAUGCACUAUGCGCG AUGCUUCCCC | 4400 |
| 1567 | CCAAGCUCUC G CUGCA | 1622 | UGCAG UGAUGGCAUGCACUAUGCGCG GAGAGCUUGG | 4401 |
| 1570 | AGCUCUCGCU G CAGGA | 1623 | UCCUG UGAUGGCAUGCACUAUGCGCG AGCGAGAGCU | 4402 |
| 1579 | UGCAGGAGCU G ACGUG | 1624 | CACGU UGAUGGCAUGCACUAUGCGCG AGCUCCUGCA | 4403 |
| 1591 | CGUGGAAGAU G AGCGU | 1625 | ACGCU UGAUGGCAUGCACUAUGCGCG AUCUUCCACG | 4404 |
| 1597 | AGAUGAGCGU G CGGGA | 1626 | UCCCG UGAUGGCAUGCACUAUGCGCG ACGCUCAUCU | 4405 |
| 1605 | GUGCGGGACU G CGCUU | 1627 | AAGCG UGAUGGCAUGCACUAUGCGCG AGUCCCGCAC | 4406 |
| 1607 | GCGGGACUGC G CUUGG | 1628 | CCAAG UGAUGGCAUGCACUAUGCGCG GCAGUCCCGC | 4407 |
| 1615 | GCGCUUGGCU G CGCAG | 1629 | CUGCG UGAUGGCAUGCACUAUGCGCG AGCCAAGCGC | 4408 |
| 1617 | GCUUGGCUGC G CAGGA | 1630 | UCCUG UGAUGGCAUGCACUAUGCGCG GCAGCCAAGC | 4409 |
| 1638 | GGGGUUGGCU G UGUUC | 1631 | GAACA UGAUGGCAUGCACUAUGCGCG AGCCAACCCC | 4410 |
| 1640 | GGUUGGCUGU G UUCCG | 1632 | CGGAA UGAUGGCAUGCACUAUGCGCG ACAGCCAACC | 4411 |
| 1649 | UGUUCCGGCC G CAGAG | 1633 | CUCUG UGAUGGCAUGCACUAUGCGCG GGCCGGAACA | 4412 |
| 1663 | AGCACCGUCU G CGUGA | 1634 | UCACG UGAUGGCAUGCACUAUGCGCG AGACGGUGCU | 4413 |
| 1667 | CCGUCUGCGU G AGGAG | 1635 | CUCCU UGAUGGCAUGCACUAUGCGCG ACGCAGACGG | 4414 |
| 1690 | CCAAGUUCCU G CACUG | 1636 | CAGUG UGAUGGCAUGCACUAUGCGCG AGGAACUUGG | 4415 |
| 1699 | UGCACUGGCU G AUGAG | 1637 | CUCAU UGAUGGCAUGCACUAUGCGCG AGCCAGUGCA | 4416 |
| 1702 | ACUGGCUGAU G AGUGU | 1638 | ACACU UGAUGGCAUGCACUAUGCGCG AUCAGCCAGU | 4417 |
| 1706 | GCUGAUGAGU G UGUAC | 1639 | GUACA UGAUGGCAUGCACUAUGCGCG ACUCAUCAGC | 4418 |
| 1708 | UGAUGAGUGU G UACGU | 1640 | ACGUA UGAUGGCAUGCACUAUGCGCG ACACUCAUCA | 4419 |
| 1718 | GUACGUCGUC G AGCUG | 1641 | CAGCU UGAUGGCAUGCACUAUGCGCG GACGACGUAC | 4420 |
| 1723 | UCGUCGAGCU G CUCAG | 1642 | CUGAG UGAUGGCAUGCACUAUGCGCG AGCUCGACGA | 4421 |
| 1742 | UUUCUUUUAU G UCACG | 1643 | CGUGA UGAUGGCAUGCACUAUGCGCG AUAAAAGAAA | 4422 |
| 1793 | CCGGAAGAGU G UCUGG | 1644 | CCAGA UGAUGGCAUGCACUAUGCGCG ACUCUUCCGG | 4423 |
| 1807 | GGAGCAAGUU G CAAAG | 1645 | CUUUG UGAUGGCAUGCACUAUGCGCG AACUUGCUCC | 4424 |
| 1834 | GACAGCACUU G AAGAG | 1646 | CUCUU UGAUGGCAUGCACUAUGCGCG AAGUGCUGUC | 4425 |
| 1843 | UGAAGAGGGU G CAGCU | 1647 | AGCUG UGAUGGCAUGCACUAUGCGCG ACCCUCUUCA | 4426 |
| 1849 | GGGUGCAGCU G CGGGA | 1648 | UCCCG UGAUGGCAUGCACUAUGCGCG AGCUGCACCC | 4427 |
| 1858 | UGCGGGAGCU G UCGGA | 1649 | UCCGA UGAUGGCAUGCACUAUGCGCG AGCUCCCGCA | 4428 |
| 1898 | AGCCAGGCCC G CCCUG | 1650 | CAGGG UGAUGGCAUGCACUAUGCGCG GGGCCUGGCU | 4429 |
| 1903 | GGCCCGCCCU G CUGAC | 1651 | GUCAG UGAUGGCAUGCACUAUGCGCG AGGGCGGGCC | 4430 |
| 1906 | CCGCCCUGCU G ACGUC | 1652 | GACGU UGAUGGCAUGCACUAUGCGCG AGCAGGGCGG | 4431 |
| 1920 | UCCAGACUCC G CUUCA | 1653 | UGAAG UGAUGGCAUGCACUAUGCGCG GGAGUCUGGA | 4432 |
| 1937 | CCCCAAGCCU G ACGGG | 1654 | CCCGU UGAUGGCAUGCACUAUGCGCG AGGCUUGGGG | 4433 |
| 1945 | CUGACGGGCU G CGGCC | 1655 | GGCCG UGAUGGCAUGCACUAUGCGCG AGCCCGUCAG | 4434 |
| 1951 | GGCUGCGGCC G AUUGU | 1656 | ACAAU UGAUGGCAUGCACUAUGCGCG GGCCGCAGCC | 4435 |
| 1955 | GCGGCCGAUU G UGAAC | 1657 | GUUCA UGAUGGCAUGCACUAUGCGCG AAUCGGCCGC | 4436 |
| 1957 | GGCCGAUUGU G AACAU | 1658 | AUGUU UGAUGGCAUGCACUAUGCGCG ACAAUCGGCC | 4437 |
| 1992 | AGAACGUUCC G CAGAG | 1659 | CUCUG UGAUGGCAUGCACUAUGCGCG GGAACGUUCU | 4438 |
| 2009 | AAAGAGGGCC G AGCGU | 1660 | ACGCU UGAUGGCAUGCACUAUGCGCG GGCCCUCUUU | 4439 |
| 2023 | GUCUCACCUC G AGGGU | 1661 | ACCCU UGAUGGCAUGCACUAUGCGCG GAGGUGAGAC | 4440 |
| 2029 | CCUCGAGGGU G AAGGC | 1662 | GCCUU UGAUGGCAUGCACUAUGCGCG ACCCUCGAGG | 4441 |
| 2038 | UGAAGGCACU G UUCAG | 1663 | CUGAA UGAUGGCAUGCACUAUGCGCG AGUGCCUUCA | 4442 |
| 2047 | UGUUCAGCGU G CUCAA | 1664 | UUGAG UGAUGGCAUGCACUAUGCGCG ACGCUGAACA | 4443 |
| 2057 | GCUCAACUAC G AGCGG | 1665 | CCGCU UGAUGGCAUGCACUAUGCGCG GUAGUUGAGC | 4444 |
| 2065 | ACGAGCGGGC G CGGCG | 1666 | CGCCG UGAUGGCAUGCACUAUGCGCG GCCCGCUCGU | 4445 |
| 2070 | CGGGCGCGGC G CCCCG | 1667 | CGGGG UGAUGGCAUGCACUAUGCGCG GCCGCGCCCG | 4446 |
| 2087 | CCUCCUGGGC G CCUCU | 1668 | AGAGG UGAUGGCAUGCACUAUGCGCG GCCCAGGAGG | 4447 |
| 2093 | GGGCGCCUCU G UGCUG | 1669 | CAGCA UGAUGGCAUGCACUAUGCGCG AGAGGCGCCC | 4448 |
| 2095 | GCGCCUCUGU G CUGGG | 1670 | CCCAG UGAUGGCAUGCACUAUGCGCG ACAGAGGCGC | 4449 |
| 2108 | GGGCCUGGAC G AUAUC | 1671 | GAUAU UGAUGGCAUGCACUAUGCGCG GUCCAGGCCC | 4450 |
| 2127 | AGGGCCUGGC G CACCU | 1672 | AGGUG UGAUGGCAUGCACUAUGCGCG GCCAGGCCCU | 4451 |
| 2137 | GCACCUUCGU G CUGCG | 1673 | CGCAG UGAUGGCAUGCACUAUGCGCG ACGAAGGUGC | 4452 |
| 2140 | CCUUCGUGCU G CGUGU | 1674 | ACACG UGAUGGCAUGCACUAUGCGCG AGCACGAAGG | 4453 |
| 2144 | CGUGCUGCGU G UGCGG | 1675 | CCGCA UGAUGGCAUGCACUAUGCGCG ACGCAGCACG | 4454 |
| 2146 | UGCUGCGUGU G CGGGC | 1676 | GCCCG UGAUGGCAUGCACUAUGCGCG ACACGCAGCA | 4455 |
| 2161 | CCCAGGACCC G CCGCC | 1677 | GGCGG UGAUGGCAUGCACUAUGCGCG GGGUCCUGGG | 4456 |
| 2164 | AGGACCCGCC G CCUGA | 1678 | UCAGG UGAUGGCAUGCACUAUGCGCG GGCGGGUCCU | 4457 |
| 2168 | CCCGCCGCCU G AGCUG | 1679 | CAGCU UGAUGGCAUGCACUAUGCGCG AGGCGGCGGG | 4458 |
| 2173 | CGCCUGAGCU G UACUU | 1680 | AAGUA UGAUGGCAUGCACUAUGCGCG AGCUCAGGCG | 4459 |
| 2180 | GCUGUACUUU G UCAAG | 1681 | CUUGA UGAUGGCAUGCACUAUGCGCG AAAGUACAGC | 4460 |
| 2192 | CAAGGUGGAU G UGACG | 1682 | CGUCA UGAUGGCAUGCACUAUGCGCG AUCCACCUUG | 4461 |
| 2194 | AGGUGGAUGU G ACGGG | 1683 | CCCGU UGAUGGCAUGCACUAUGCGCG ACAUCCACCU | 4462 |
| 2201 | UGUGACGGGC G CGUAC | 1684 | GUACG UGAUGGCAUGCACUAUGCGCG GCCCGUCACA | 4463 |
| 2207 | GGGCGCGUAC G ACACC | 1685 | GGUGU UGAUGGCAUGCACUAUGCGCG GUACGCGCCC | 4464 |
| 2243 | GGAGGUCAUC G CCAGC | 1686 | GCUGG UGAUGGCAUGCACUAUGCGCG GAUGACCUCC | 4465 |
| 2274 | AACACGUACU G CGUGC | 1687 | GCACG UGAUGGCAUGCACUAUGCGCG AGUACGUGUU | 4466 |
| 2278 | CGUACUGCGU G CGUCG | 1688 | CGACG UGAUGGCAUGCACUAUGCGCG ACGCAGUACG | 4467 |
| 2288 | GCGUCGGUAU G CCGUG | 1689 | CACGG UGAUGGCAUGCACUAUGCGCG AUACCGACGC | 4468 |
| 2306 | CCAGAAGGCC G CCCAU | 1690 | AUGGG UGAUGGCAUGCACUAUGCGCG GGCCUUCUGG | 4469 |
| 2322 | GGGCACGUCC G CAAGG | 1691 | CCUUG UGAUGGCAUGCACUAUGCGCG GGACGUGCCC | 4470 |
| 2353 | UCUCUACCUU G ACAGA | 1692 | UCUGU UGAUGGCAUGCACUAUGCGCG AAGGUAGAGA | 4471 |
| 2374 | AGCCGUACAU G CGACA | 1693 | UGUCG UGAUGGCAUGCACUAUGCGCG AUGUACGGCU | 4472 |
| 2376 | CCGUACAUGC G ACAGU | 1694 | ACUGU UGAUGGCAUGCACUAUGCGCG GCAUGUACGG | 4473 |
| 2395 | UGGCUCACCU G CAGGA | 1695 | UCCUG UGAUGGCAUGCACUAUGCGCG AGGUGAGCCA | 4474 |
| 2410 | AGACCAGCCC G CUGAG | 1696 | CUCAG UGAUGGCAUGCACUAUGCGCG GGGCUGGUCU | 4475 |
| 2413 | CCAGCCCGCU G AGGGA | 1697 | UCCCU UGAUGGCAUGCACUAUGCGCG AGCGGGCUGG | 4476 |
| 2420 | GCUGAGGGAU G CCGUC | 1698 | GACGG UGAUGGCAUGCACUAUGCGCG AUCCCUCAGC | 4477 |
| 2432 | CGUCGUCAUC G AGCAG | 1699 | CUGCU UGAUGGCAUGCACUAUGCGCG GAUGACGACG | 4478 |
| 2449 | GCUCCUCCCU G AAUGA | 1700 | UCAUU UGAUGGCAUGCACUAUGCGCG AGGGAGGAGC | 4479 |
| 2453 | CUCCCUGAAU G AGGCC | 1701 | GGCCU UGAUGGCAUGCACUAUGCGCG AUUCAGGGAG | 4480 |
| 2474 | UGGCCUCUUC G ACGUC | 1702 | GACGU UGAUGGCAUGCACUAUGCGCG GAAGAGGCCA | 4481 |
| 2487 | GUCUUCCUAC G CUUCA | 1703 | UGAAG UGAUGGCAUGCACUAUGCGCG GUAGGAAGAC | 4482 |
| 2494 | UACGCUUCAU G UGCCA | 1704 | UGGCA UGAUGGCAUGCACUAUGCGCG AUGAAGCGUA | 4483 |
| 2496 | CGCUUCAUGU G CCACC | 1705 | GGUGG UGAUGGCAUGCACUAUGCGCG ACAUGAAGCG | 4484 |
| 2504 | GUGCCACCAC G CCGUG | 1706 | CACGG UGAUGGCAUGCACUAUGCGCG GUGGUGGCAC | 4485 |
| 2509 | ACCACGCCGU G CGCAU | 1707 | AUGCG UGAUGGCAUGCACUAUGCGCG ACGGCGUGGU | 4486 |
| 2511 | CACGCCGUGC G CAUCA | 1708 | UGAUG UGAUGGCAUGCACUAUGCGCG GCACGGCGUG | 4487 |
| 2538 | UACGUCCAGU G CCAGG | 1709 | CCUGG UGAUGGCAUGCACUAUGCGCG ACUGGACGUA | 4488 |
| 2551 | AGGGGAUCCC G CAGGG | 1710 | CCCUG UGAUGGCAUGCACUAUGCGCG GGGAUCCCCU | 4489 |
| 2572 | UCCUCUCCAC G CUGCU | 1711 | AGCAG UGAUGGCAUGCACUAUGCGCG GUGGAGAGGA | 4490 |
| 2575 | UCUCCACGCU G CUCUG | 1712 | CAGAG UGAUGGCAUGCACUAUGCGCG AGCGUGGAGA | 4491 |
| 2580 | ACGCUGCUCU G CAGCC | 1713 | GGCUG UGAUGGCAUGCACUAUGCGCG AGAGCAGCGU | 4492 |
| 2587 | UCUGCAGCCU G UGCUA | 1714 | UAGCA UGAUGGCAUGCACUAUGCGCG AGGCUGCAGA | 4493 |
| 2589 | UGCAGCCUGU G CUACG | 1715 | CGUAG UGAUGGCAUGCACUAUGCGCG ACAGGCUGCA | 4494 |
| 2597 | GUGCUACGGC G ACAUG | 1716 | CAUGU UGAUGGCAUGCACUAUGCGCG GCCGUAGCAC | 4495 |
| 2614 | AGAACAAGCU G UUUGC | 1717 | GCAAA UGAUGGCAUGCACUAUGCGCG AGCUUGUUCU | 4496 |
| 2618 | CAAGCUGUUU G CGGGG | 1718 | CCCCG UGAUGGCAUGCACUAUGCGCG AAACAGCUUG | 4497 |
| 2641 | GGGACGGGCU G CUCCU | 1719 | AGGAG UGAUGGCAUGCACUAUGCGCG AGCCCGUCCC | 4498 |
| 2647 | GGCUGCUCCU G CGUUU | 1720 | AAACG UGAUGGCAUGCACUAUGCGCG AGGAGCAGCC | 4499 |
| 2660 | UUUGGUGGAU G AUUUC | 1721 | GAAAU UGAUGGCAUGCACUAUGCGCG AUCCACCAAA | 4500 |
| 2668 | AUGAUUUCUU G UUGGU | 1722 | ACCAA UGAUGGCAUGCACUAUGCGCG AAGAAAUCAU | 4501 |
| 2674 | UCUUGUUGGU G ACACC | 1723 | GGUGU UGAUGGCAUGCACUAUGCGCG ACCAACAAGA | 4502 |
| 2693 | CCUCACCCAC G CGAAA | 1724 | UUUCG UGAUGGCAUGCACUAUGCGCG GUGGGUGAGG | 4503 |
| 2695 | UCACCCACGC G AAAAC | 1725 | GUUUU UGAUGGCAUGCACUAUGCGCG GCGUGGGUGA | 4504 |
| 2721 | ACCCUGGUCC G AGGUG | 1726 | CACCU UGAUGGCAUGCACUAUGCGCG GGACCAGGGU | 4505 |
| 2726 | GGUCCGAGGU G UCCCU | 1727 | AGGGA UGAUGGCAUGCACUAUGCGCG ACCUCGGACC | 4506 |
| 2732 | AGGUGUCCCU G AGUAU | 1728 | AUACU UGAUGGCAUGCACUAUGCGCG AGGGACACCU | 4507 |
| 2742 | GAGUAUGGCU G CGUGG | 1729 | CCACG UGAUGGCAUGCACUAUGCGCG AGCCAUACUC | 4508 |
| 2749 | GCUGCGUGGU G AACUU | 1730 | AAGUU UGAUGGCAUGCACUAUGCGCG ACCACGCAGC | 4509 |
| 2755 | UGGUGAACUU G CGGAA | 1731 | UUCCG UGAUGGCAUGCACUAUGCGCG AAGUUCACCA | 4510 |
| 2770 | AGACAGUGGU G AACUU | 1732 | AAGUU UGAUGGCAUGCACUAUGCGCG ACCACUGUCU | 4511 |
| 2780 | GAACUUCCCU G UAGAA | 1733 | UUCUA UGAUGGCAUGCACUAUGCGCG AGGGAAGUUC | 4512 |
| 2789 | UGUAGAAGAC G AGGCC | 1734 | GGCCU UGAUGGCAUGCACUAUGCGCG GUCUUCUACA | 4513 |
| 2813 | CACGGCUUUU G UUCAG | 1735 | CUGAA UGAUGGCAUGCACUAUGCGCG AAAAGCCGUG | 4514 |
| 2821 | UUGUUCAGAU G CCGGC | 1736 | GCCGG UGAUGGCAUGCACUAUGCGCG AUCUGAACAA | 4515 |
| 2847 | UUCCCCUGGU G CGGCC | 1737 | GGCCG UGAUGGCAUGCACUAUGCGCG ACCAGGGGAA | 4516 |
| 2854 | GGUGCGGCCU G CUGCU | 1738 | AGCAG UGAUGGCAUGCACUAUGCGCG AGGCCGCACC | 4517 |
| 2857 | GCGGCCUGCU G CUGGA | 1739 | UCCAG UGAUGGCAUGCACUAUGCGCG AGCAGGCCGC | 4518 |
| 2881 | CCCUGGAGGU G CAGAG | 1740 | CUCUG UGAUGGCAUGCACUAUGCGCG ACCUCCAGGG | 4519 |
| 2888 | GGUGCAGAGC G ACUAC | 1741 | GUAGU UGAUGGCAUGCACUAUGCGCG GCUCUGCACC | 4520 |
| 2903 | CUCCAGCUAU G CCCGG | 1742 | CCGGG UGAUGGCAUGCACUAUGCGCG AUAGCUGGAG | 4521 |
| 2940 | ACCUUCAACC G CGGCU | 1743 | AGCCG UGAUGGCAUGCACUAUGCGCG GGUUGAAGGU | 4522 |
| 2965 | GGAGGAACAU G CGUCG | 1744 | CGACG UGAUGGCAUGCACUAUGCGCG AUGUUCCUCC | 4523 |
| 2970 | AACAUGCGUC G CAAAC | 1745 | GUUUG UGAUGGCAUGCACUAUGCGCG GACGCAUGUU | 4524 |
| 2989 | UUGGGGUCUU G CGGCU | 1746 | AGCCG UGAUGGCAUGCACUAUGCGCG AAGACCCCAA | 4525 |
| 2995 | UCUUGCGGCU G AAGUG | 1747 | CACUU UGAUGGCAUGCACUAUGCGCG AGCCGCAAGA | 4526 |
| 3000 | CGGCUGAAGU G UCACA | 1748 | UGUGA UGAUGGCAUGCACUAUGCGCG ACUUCAGCCG | 4527 |
| 3010 | GUCACAGCCU G UUUCU | 1749 | AGAAA UGAUGGCAUGCACUAUGCGCG AGGCUGUGAC | 4528 |
| 3022 | UUCUGGAUUU G CAGGU | 1750 | ACCUG UGAUGGCAUGCACUAUGCGCG AAAUCCAGAA | 4529 |
| 3028 | AUUUGCAGGU G AACAG | 1751 | CUGUU UGAUGGCAUGCACUAUGCGCG ACCUGCAAAU | 4530 |
| 3046 | UCCAGACGGU G UGCAC | 1752 | GUGCA UGAUGGCAUGCACUAUGCGCG ACCGUCUGGA | 4531 |
| 3048 | CAGACGGUGU G CACCA | 1753 | UGGUG UGAUGGCAUGCACUAUGCGCG ACACCGUCUG | 4532 |
| 3073 | AGAUCCUCCU G CUGCA | 1754 | UGCAG UGAUGGCAUGCACUAUGCGCG AGGAGGAUCU | 4533 |
| 3076 | UCCUCCUGCU G CAGGC | 1755 | GCCUG UGAUGGCAUGCACUAUGCGCG AGCAGGAGGA | 4534 |
| 3095 | CAGGUUUCAC G CAUGU | 1756 | ACAUG UGAUGGCAUGCACUAUGCGCG GUGAAACCUG | 4535 |
| 3099 | UUUCACGCAU G UGUGC | 1757 | GCACA UGAUGGCAUGCACUAUGCGCG AUGCGUGAAA | 4536 |
| 3101 | UCACGCAUGU G UGCUG | 1758 | CAGCA UGAUGGCAUGCACUAUGCGCG ACAUGCGUGA | 4537 |
| 3103 | ACGCAUGUGU G CUGCA | 1759 | UGCAG UGAUGGCAUGCACUAUGCGCG ACACAUGCGU | 4538 |
| 3106 | CAUGUGUGCU G CAGCU | 1760 | AGCUG UGAUGGCAUGCACUAUGCGCG AGCACACAUG | 4539 |
| 3154 | CAUUUUUCCU G CGCGU | 1761 | ACGCG UGAUGGCAUGCACUAUGCGCG AGGAAAAAUG | 4540 |
| 3156 | UUUUUCCUGC G CGUCA | 1762 | UGACG UGAUGGCAUGCACUAUGCGCG GCAGGAAAAA | 4541 |
| 3167 | CGUCAUCUCU G ACACG | 1763 | CGUGU UGAUGGCAUGCACUAUGCGCG AGAGAUGACG | 4542 |
| 3183 | GCCUCCCUCU G CUACU | 1764 | AGUAG UGAUGGCAUGCACUAUGCGCG AGAGGGAGGC | 4543 |
| 3196 | ACUCCAUCCU G AAAGC | 1765 | GCUUU UGAUGGCAUGCACUAUGCGCG AGGAUGGAGU | 4544 |
| 3209 | AGCCAAGAAC G CAGGG | 1766 | CCCUG UGAUGGCAUGCACUAUGCGCG GUUCUUGGCU | 4545 |
| 3217 | ACGCAGGGAU G UCGCU | 1767 | AGCGA UGAUGGCAUGCACUAUGCGCG AUCCCUGCGU | 4546 |
| 3220 | CAGGGAUGUC G CUGGG | 1768 | CCCAG UGAUGGCAUGCACUAUGCGCG GACAUCCCUG | 4547 |
| 3236 | GGCCAAGGGC G CCGCC | 1769 | GGCGG UGAUGGCAUGCACUAUGCGCG GCCCUUGGCC | 4548 |
| 3239 | CAAGGGCGCC G CCGGC | 1770 | GCCGG UGAUGGCAUGCACUAUGCGCG GGCGCCCUUG | 4549 |
| 3250 | CCGGCCCUCU G CCCUC | 1771 | GAGGG UGAUGGCAUGCACUAUGCGCG AGAGGGCCGG | 4550 |
| 3257 | UCUGCCCUCC G AGGCC | 1772 | GGCCU UGAUGGCAUGCACUAUGCGCG GGAGGGCAGA | 4551 |
| 3265 | CCGAGGCCGU G CAGUG | 1773 | CACUG UGAUGGCAUGCACUAUGCGCG ACGGCCUCGG | 4552 |
| 3274 | UGCAGUGGCU G UGCCA | 1774 | UGGCA UGAUGGCAUGCACUAUGCGCG AGCCACUGCA | 4553 |
| 3276 | CAGUGGCUGU G CCACC | 1775 | GGUGG UGAUGGCAUGCACUAUGCGCG ACAGCCACUG | 4554 |
| 3292 | AAGCAUUCCU G CUCAA | 1776 | UUGAG UGAUGGCAUGCACUAUGCGCG AGGAAUGCUU | 4555 |
| 3301 | UGCUCAAGCU G ACUCG | 1777 | CGAGU UGAUGGCAUGCACUAUGCGCG AGCUUGAGCA | 4556 |
| 3306 | AAGCUGACUC G ACACC | 1778 | GGUGU UGAUGGCAUGCACUAUGCGCG GAGUCAGCUU | 4557 |
| 3314 | UCGACACCGU G UCACC | 1779 | GGUGA UGAUGGCAUGCACUAUGCGCG ACGGUGUCGA | 4558 |
| 3325 | UCACCUACGU G CCACU | 1780 | AGUGG UGAUGGCAUGCACUAUGCGCG ACGUAGGUGA | 4559 |
| 3358 | CAGCCCAGAC G CAGCU | 1781 | AGCUG UGAUGGCAUGCACUAUGCGCG GUCUGGGCUG | 4560 |
| 3364 | AGACGCAGCU G AGUCG | 1782 | CGACU UGAUGGCAUGCACUAUGCGCG AGCUGCGUCU | 4561 |
| 3385 | UCCCGGGGAC G ACGCU | 1783 | AGCGU UGAUGGCAUGCACUAUGCGCG GUCCCCGGGA | 4562 |
| 3388 | CGGGGACGAC G CUGAC | 1784 | GUCAG UGAUGGCAUGCACUAUGCGCG GUCGUCCCCG | 4563 |
| 3391 | GGACGACGCU G ACUGC | 1785 | GCAGU UGAUGGCAUGCACUAUGCGCG AGCGUCGUCC | 4564 |
| 3395 | GACGCUGACU G CCCUG | 1786 | CAGGG UGAUGGCAUGCACUAUGCGCG AGUCAGCGUC | 4565 |
| 3407 | CCUGGAGGCC G CAGCC | 1787 | GGCUG UGAUGGCAUGCACUAUGCGCG GGCCUCCAGG | 4566 |
| 3424 | ACCCGGCACU G CCCUC | 1788 | GAGGG UGAUGGCAUGCACUAUGCGCG AGUGCCGGGU | 4567 |
| 3453 | AUCCUGGACU G AUGGC | 1789 | GCCAU UGAUGGCAUGCACUAUGCGCG AGUCCAGGAU | 4568 |
| 3464 | AUGGCCACCC G CCCAC | 1790 | GUGGG UGAUGGCAUGCACUAUGCGCG GGGUGGCCAU | 4569 |
| 3479 | CAGCCAGGCC G AGAGC | 1791 | GCUCU UGAUGGCAUGCACUAUGCGCG GGCCUGGCUG | 4570 |
| 3501 | CAGCAGCCCU G UCACG | 1792 | CGUGA UGAUGGCAUGCACUAUGCGCG AGGGCUGCUG | 4571 |
| 3506 | GCCCUGUCAC G CCGGG | 1793 | CCCGG UGAUGGCAUGCACUAUGCGCG GUGACAGGGC | 4572 |
| 3554 | ACCCAGGCCC G CACCG | 1794 | CGGUG UGAUGGCAUGCACUAUGCGCG GGGCCUGGGU | 4573 |
| 3559 | GGCCCGCACC G CUGGG | 1795 | CCCAG UGAUGGCAUGCACUAUGCGCG GGUGCGGGCC | 4574 |
| 3570 | CUGGGAGUCU G AGGCC | 1796 | GGCCU UGAUGGCAUGCACUAUGCGCG AGACUCCCAG | 4575 |
| 3577 | UCUGAGGCCU G AGUGA | 1797 | UCACU UGAUGGCAUGCACUAUGCGCG AGGCCUCAGA | 4576 |
| 3581 | AGGCCUGAGU G AGUGU | 1798 | ACACU UGAUGGCAUGCACUAUGCGCG ACUCAGGCCU | 4577 |
| 3585 | CUGAGUGAGU G UUUGG | 1799 | CCAAA UGAUGGCAUGCACUAUGCGCG ACUCACUCAG | 4578 |
| 3593 | GUGUUUGGCC G AGGCC | 1800 | GGCCU UGAUGGCAUGCACUAUGCGCG GGCCAAACAC | 4579 |
| 3600 | GCCGAGGCCU G CAUGU | 1801 | ACAUG UGAUGGCAUGCACUAUGCGCG AGGCCUCGGC | 4580 |
| 3604 | AGGCCUGCAU G UCCGG | 1802 | CCGGA UGAUGGCAUGCACUAUGCGCG AUGCAGGCCU | 4581 |
| 3612 | AUGUCCGGCU C AAGGC | 1803 | GCCUU UGAUGGCAUGCACUAUGCGCG AGCCGGACAU | 4582 |
| 3619 | GCUGAAGGCU C AGUGU | 1804 | ACACU UGAUGGCAUGCACUAUGCGCG AGCCUUCAGC | 4583 |
| 3623 | AAGGCUGAGU G UCCGG | 1805 | CCGGA UGAUGGCAUGCACUAUGCGCG ACUCAGCCUU | 4584 |
| 3631 | GUGUCCGGCU G AGGCC | 1806 | GGCCU UGAUGGCAUGCACUAUGCGCG AGCCGGACAC | 4585 |
| 3638 | GCUGAGGCCU G AGCGA | 1807 | UCGCU UGAUGGCAUGCACUAUGCGCG AGGCCUCAGC | 4586 |
| 3642 | AGGCCUGAGC G AGUGU | 1808 | ACACU UGAUGGCAUGCACUAUGCGCG GCUCAGGCCU | 4587 |
| 3646 | CUGAGCGAGU G UCCAG | 1809 | CUGGA UGAUGGCAUGCACUAUGCGCG ACUCGCUCAG | 4588 |
| 3661 | GCCAAGGGCU G AGUGU | 1810 | ACACU UGAUGGCAUGCACUAUGCGCG AGCCCUUGGC | 4589 |
| 3665 | AGGGCUGAGU G UCCAG | 1811 | CUGGA UGAUGGCAUGCACUAUGCGCG ACUCAGCCCU | 4590 |
| 3678 | CAGCACACCU G CCGUC | 1812 | GACGG UGAUGGCAUGCACUAUGCGCG AGGUGUGCUG | 4591 |
| 3705 | ACAGGCUGGC G CUCGG | 1813 | CCGAG UGAUGGCAUGCACUAUGCGCG GCCAGCCUGU | 4592 |
| 3789 | CCCCAGAUUC G CCAUU | 1814 | AAUGG UGAUGGCAUGCACUAUGCGCG GAAUCUGGGG | 4593 |
| 3795 | AUUCGCCAUU G UUCAC | 1815 | GUGAA UGAUGGCAUGCACUAUGCGCG AAUGGCGAAU | 4594 |
| 3806 | UUCACCCCUC G CCCUG | 1816 | CAGGG UGAUGGCAUGCACUAUGCGCG GAGGGGUGAA | 4595 |
| 3811 | CCCUCGCCCU C CCCUC | 1817 | GAGGG UGAUGGCAUGCACUAUGCGCG AGGGCGAGGG | 4596 |
| 3821 | GCCCUCCUUU G CCUUC | 1818 | GAAGG UGAUGGCAUGCACUAUGCGCG AAAGGAGGGC | 4597 |
| 3854 | UGGAGACCCU G AGAAG | 1819 | CUUCU UGAUGGCAUGCACUAUGCGCG AGGGUCUCCA | 4598 |
| 3888 | AAUUUGGAGU G ACCAA | 1820 | UUGGU UGAUGGCAUGCACUAUGCGCG ACUCCAAAUU | 4599 |
| 3898 | GACCAAAGGU G UGCCC | 1821 | GGGCA UGAUGGCAUGCACUAUGCGCG ACCUUUGGUC | 4600 |
| 3900 | CCAAAGGUGU G CCCUG | 1822 | CAGGG UGAUGGCAUGCACUAUGCGCG ACACCUUUGG | 4601 |
| 3905 | GGUGUGCCCU G UACAC | 1823 | GUGUA UGAUGGCAUGCACUAUGCGCG AGGGCACACC | 4602 |
| 3915 | GUACACAGGC G AGGAC | 1824 | GUCCU UGAUGGCAUGCACUAUGCGCG GCCUGUGUAC | 4603 |
| 3924 | CGAGGACCCU G CACCU | 1825 | AGGUG UGAUGGCAUGCACUAUGCGCG AGGGUCCUCG | 4604 |
| 3944 | GGGGGUCCCU G UGGGU | 1826 | ACCCA UGAUGGCAUGCACUAUGCGCG AGGGACCCCC | 4605 |
| 3966 | GGGGGGAGGU G CUGUG | 1827 | CACAG UGAUGGCAUGCACUAUGCGCG ACCUCCCCCC | 4606 |
| 3969 | GGGAGGUGCU G UGGGA | 1828 | UCCCA UGAUGGCAUGCACUAUGCGCG AGCACCUCCC | 4607 |
| 3985 | GUAAAAUACU G AAUAU | 1829 | AUAUU UGAUGGCAUGCACUAUGCGCG AGUAUUUUAC | 4608 |
| 3993 | CUGAAUAUAU G AGUUU | 1830 | AAACU UGAUGGCAUGCACUAUGCGCG AUAUAUUCAG | 4609 |
| 4008 | UUUCAGUUUU G AAAAA | 1831 | UUUUU UGAUGGCAUGCACUAUGCGCG AAAACUGAAA | 4610 |

Seq1 = TERT (Homo sapiens telomerase reverse transcriptase (TERT) mRNA, 4015 bp); Nakamura et al., Science 277 (5328), 955-959 (1997)
Input Sequence = TERT. Cut Site = YG/M or UG/U.
Stem Length = 5/10. Core Sequence = UGAUG GCAUGCACUAUGC GCG

[0185] TABLE VI

Human telomerase reverse transcriptase (TERT) DNAzyme and Target
Sequence

| | | | | |
|---|---|---|---|---|
| nt. | | Seq. ID | | Seq. ID |
| Position | DNAzyme Sequence | Nos | Substrate | Nos |

| | | | | |
|---|---|---|---|---|
| 9 | CAGGACGC GGCTAGCTACAACGA AGCGCTGC | 1832 | GCAGCGCU G GCGUCCUG | 4611 |
| 11 | AGCAGGAC GGCTAGCTACAACGA GCAGCGCT | 1833 | AGCGCUGC G GUCCUGCU | 4612 |
| 16 | TGCGCAGC GGCTAGCTACAACGA AGGACGCA | 1834 | UGCGUCCU G GCUGCGCA | 4613 |
| 19 | ACGTGCGC GGCTAGCTACAACGA AGCAGGAC | 1835 | GUCCUGCU G GCGCACGU | 4614 |
| 21 | CCACGTGC GGCTAGCTACAACGA GCAGCAGG | 1836 | CCUGCUGC G GCACGUGG | 4615 |
| 23 | TCCCACGT GGCTAGCTACAACGA GCGCAGCA | 1837 | UGCUGCGC A ACGUGGGA | 4616 |
| 25 | CTTCCCAC GGCTAGCTACAACGA GTGCGCAG | 1838 | CUGCGCAC G GUGGGAAG | 4617 |
| 32 | GCCAGGGC GGCTAGCTACAACGA TTCCCACG | 1839 | CGUGGGAA G GCCCUGGC | 4618 |
| 38 | GCCGGGGC GGCTAGCTACAACGA CAGGGCTT | 1840 | AAGCCCUG G GCCCCGGC | 4619 |
| 44 | GGGGTGGC GGCTAGCTACAACGA CGGGGCCA | 1841 | UGGCCCCG G GCCACCCC | 4620 |
| 47 | GCGGGGGT GGCTAGCTACAACGA GGCCGGGG | 1842 | CCCCGGCC A ACCCCCGC | 4621 |
| 53 | GGCATCGC GGCTAGCTACAACGA GGGGGTGG | 1843 | CCACCCCC G GCGAUGCC | 4622 |
| 56 | CGCGGCAT GGCTAGCTACAACGA CGCGGGGG | 1844 | CCCCCGCG A AUGCCGCG | 4623 |
| 58 | CGCGCGGC GGCTAGCTACAACGA ATCGCGGG | 1845 | CCCGCGAU G GCCGCGCG | 4624 |
| 61 | GAGCGCGC GGCTAGCTACAACGA GGCATCGC | 1846 | GCGAUGCC G GCGCGCUC | 4625 |
| 63 | GGGAGCGC GGCTAGCTACAACGA GCGGCATC | 1847 | GAUGCCGC G GCGCUCCC | 4626 |
| 65 | CGGGGAGC GGCTAGCTACAACGA GCGCGGCA | 1848 | UGCCGCGC G GCUCCCCG | 4627 |
| 72 | TCGGCAGC GGCTAGCTACAACGA GGGGAGCG | 1849 | CGCUCCCC G GCUGCCGA | 4628 |
| 75 | GGCTCGGC GGCTAGCTACAACGA AGCGGGGA | 1850 | UCCCCGCU G GCCGAGCC | 4629 |
| 80 | CGCACGGC GGCTAGCTACAACGA TCGGCAGC | 1851 | GCUGCCGA G GCCGUGCG | 4630 |
| 83 | GAGCGCAC GGCTAGCTACAACGA GGCTCGGC | 1852 | GCCGAGCC G GUGCGCUC | 4631 |
| 85 | GGGAGCGC GGCTAGCTACAACGA ACGGCTCG | 1853 | CGAGCCGU G GCGCUCCC | 4632 |
| 87 | CAGGGAGC GGCTAGCTACAACGA GCACGGCT | 1854 | AGCCGUGC G GCUCCCUG | 4633 |
| 94 | TGCGCAGC GGCTAGCTACAACGA AGGGAGCG | 1855 | CGCUCCCU G GCUGCGCA | 4634 |
| 97 | GGCTGCGC GGCTAGCTACAACGA AGCAGGGA | 1856 | UCCCUGCU G GCGCAGCC | 4635 |
| 99 | GTGGCTGC GGCTAGCTACAACGA GCAGCAGG | 1857 | CCUGCUGC G GCAGCCAC | 4636 |
| 102 | GTAGTGGC GGCTAGCTACAACGA TGCGCAGC | 1858 | GCUGCGCA G GCCACUAC | 4637 |
| 105 | GCGGTAGT GGCTAGCTACAACGA GGCTGCGC | 1859 | GCGCAGCC A ACUACCGC | 4638 |
| 108 | CTCGCGGT GGCTAGCTACAACGA AGTGGCTG | 1860 | CAGCCACU A ACCGCGAG | 4639 |
| 111 | CACCTCGC GGCTAGCTACAACGA GGTAGTGG | 1861 | CCACUACC G GCGAGGUG | 4640 |
| 116 | GGCAGCAC GGCTAGCTACAACGA CTCGCGGT | 1862 | ACCGCGAG G GUGCUGCC | 4641 |
| 118 | GCGGCAGC GGCTAGCTACAACGA ACCTCGCG | 1863 | CGCGAGGU G GCUGCCGC | 4642 |
| 121 | CCAGCGGC GGCTAGCTACAACGA AGCACCTC | 1864 | GAGGUGCU G GCCGCUGG | 4643 |
| 124 | TGGCCAGC GGCTAGCTACAACGA GGCAGCAC | 1865 | GUGCUGCC G GCUGGCCA | 4644 |
| 128 | AACGTGGC GGCTAGCTACAACGA CAGCGGCA | 1866 | UGCCGCUG G GCCACGUU | 4645 |
| 131 | ACGAACGT GGCTAGCTACAACGA GGCCAGCG | 1867 | CGCUGGCC A ACGUUCGU | 4646 |
| 133 | GCACGAAC GGCTAGCTACAACGA GTGGCCAG | 1868 | CUGGCCAC G GUUCGUGC | 4647 |
| 137 | CGCCGCAC GGCTAGCTACAACGA GAACGTGG | 1869 | CCACGUUC G GUGCGGCG | 4648 |
| 139 | GGCGCCGC GGCTAGCTACAACGA ACGAACGT | 1870 | ACGUUCGU G GCGGCGCC | 4649 |
| 142 | CCAGGCGC GGCTAGCTACAACGA CGCACGAA | 1871 | UUCGUGCG G GCGCCUGG | 4650 |
| 144 | CCCCAGGC GGCTAGCTACAACGA GCCGCACG | 1872 | CGUGCGGC G GCCUGGGG | 4651 |
| 151 | CCTGGGGC GGCTAGCTACAACGA CCCAGGCG | 1873 | CGCCUGGG G GCCCCAGG | 4652 |
| 159 | CCGCCAGC GGCTAGCTACAACGA CCTGGGGC | 1874 | GCCCCAGG G GCUGGCGG | 4653 |
| 163 | CCAGCCGC GGCTAGCTACAACGA CAGCCCTG | 1875 | CAGGGCUG G GCGGCUGG | 4654 |
| 166 | GCACCAGC GGCTAGCTACAACGA CGCCAGCC | 1876 | GGCUGGCG G GCUGGUGC | 4655 |
| 170 | CGCTGCAC GGCTAGCTACAACGA CAGCCGCC | 1877 | GGCGGCUG G GUGCAGCG | 4656 |
| 172 | CGCGCTGC GGCTAGCTACAACGA ACCAGCCG | 1878 | CGGCUGGU G GCAGCGCG | 4657 |
| 175 | CCCCGCGC GGCTAGCTACAACGA TGCACCAG | 1879 | CUGGUGCA G GCGCGGGG | 4658 |
| 177 | GTCCCCGC GGCTAGCTACAACGA GCTGCACC | 1880 | GGUGCAGC G GCGGGGAC | 4659 |
| 183 | CGCCGGGT GGCTAGCTACAACGA CCCCGCGC | 1881 | GCGCGGGG A ACCCGGCG | 4660 |
| 188 | AAAGCCGC GGCTAGCTACAACGA CGGGTCCC | 1882 | GGGACCCG G GCGGCUUU | 4661 |
| 191 | CGGAAAGC GGCTAGCTACAACGA CGCCGGGT | 1883 | ACCCGGCG G GCUUUCCG | 4662 |
| 198 | CAGCGCGC GGCTAGCTACAACGA GGAAAGCC | 1884 | GGCUUUCC G GCGCGCUG | 4663 |
| 200 | ACCAGCGC GGCTAGCTACAACGA GCGGAAAG | 1885 | CUUUCCGC G GCGCUGGU | 4664 |
| 202 | CCACCAGC GGCTAGCTACAACGA GCGCGGAA | 1886 | UUCCGCGC G GCUGGUGG | 4665 |
| 206 | TGGGCCAC GGCTAGCTACAACGA CAGCGCGC | 1887 | GCGCGCUG G GUGGCCCA | 4666 |
| 209 | CACTGGGC GGCTAGCTACAACGA CACCAGCG | 1888 | CGCUGGUG G GCCCAGUG | 4667 |
| 214 | CCAGGCAC GGCTAGCTACAACGA TGGGCCAC | 1889 | GUGGCCCA G GUGCCUGG | 4668 |
| 216 | CACCAGGC GGCTAGCTACAACGA ACTGGGCC | 1890 | GGCCCAGU G GCCUGGUG | 4669 |
| 221 | ACGCACAC GGCTAGCTACAACGA CAGGCACT | 1891 | AGUGCCUG G GUGUGCGU | 4670 |
| 223 | GCACGCAC GGCTAGCTACAACGA ACCAGGCA | 1892 | UGCCUGGU G GUGCGUGC | 4671 |
| 225 | GGGCACGC GGCTAGCTACAACGA ACACCAGG | 1893 | CCUGGUGU G GCGUGCCC | 4672 |
| 227 | CAGGGCAC GGCTAGCTACAACGA GCACACCA | 1894 | UGGUGUGC G GUGCCCUG | 4673 |
| 229 | CCCAGGGC GGCTAGCTACAACGA ACGCACAC | 1895 | GUGUGCGU G GCCCUGGG | 4674 |
| 237 | CCGTGCGT GGCTAGCTACAACGA CCCAGGGC | 1896 | GCCCUGGG A ACGCACGG | 4675 |
| 239 | GGCCGTGC GGCTAGCTACAACGA GTCCCAGG | 1897 | CCUGGGAC G GCACGGCC | 4676 |
| 241 | GCGGCCGT GGCTAGCTACAACGA GCGTCCCA | 1898 | UGGGACGC A ACGGCCGC | 4677 |
| 244 | GGGGCGGC GGCTAGCTACAACGA CGTGCGTC | 1899 | GACGCACG G GCCGCCCC | 4678 |
| 247 | CGGGGGGC GGCTAGCTACAACGA GGCCGTGC | 1900 | GCACGGCC G GCCCCCCG | 4679 |
| 254 | GGGGCGGC GGCTAGCTACAACGA GGGGGGCG | 1901 | CGCCCCCC G GCCGCCCC | 4680 |
| 257 | GAGGGGGC GGCTAGCTACAACGA GGCGGGGG | 1902 | CCCCCGCC G GCCCCCUC | 4681 |
| 270 | CACCTGGC GGCTAGCTACAACGA GGAAGGAG | 1903 | CUCCUUCC G GCCAGGUG | 4682 |
| 275 | CAGGACAC GGCTAGCTACAACGA CTGGCGGA | 1904 | UCCGCCAG G GUGUCCUG | 4683 |
| 277 | GGCAGGAC GGCTAGCTACAACGA ACCTGGCG | 1905 | CGCCAGGU G GUCCUGCC | 4684 |
| 282 | CTTCAGGC GGCTAGCTACAACGA AGGACACC | 1906 | GGUGUCCU G GCCUGAAG | 4685 |
| 292 | CCACCAGC GGCTAGCTACAACGA TCCTTCAG | 1907 | CUGAAGGA G GCUGGUGG | 4686 |
| 296 | CGGGCCAC GGCTAGCTACAACGA CAGCTCCT | 1908 | AGGAGCUG G GUGGCCCG | 4687 |
| 299 | ACTCGGGC GGCTAGCTACAACGA CACCAGCT | 1909 | ACCUGGUG G GCCCGAGU | 4688 |
| 305 | TGCAGCAC GGCTAGCTACAACGA TCGGGCCA | 1910 | UGGCCCGA G GUGCUGCA | 4689 |
| 307 | TCTGCAGC GGCTAGCTACAACGA ACTCGGGC | 1911 | GCCCGAGU G GCUGCAGA | 4690 |
| 310 | GCCTCTGC GGCTAGCTACAACGA AGCACTCG | 1912 | CGAGUGCU G GCAGAGGC | 4691 |
| 316 | CGCACAGC GGCTAGCTACAACGA CTCTGCAG | 1913 | CUGCAGAG G GCUGUGCG | 4692 |
| 319 | GCTCGCAC GGCTAGCTACAACGA AGCCTCTG | 1914 | CAGAGGCU G GUGCGAGC | 4693 |
| 321 | GCGCTCGC GGCTAGCTACAACGA ACAGCCTC | 1915 | GAGGCUGU G GCGAGCGC | 4694 |
| 325 | CGCCGCGC GGCTAGCTACAACGA TCGCACAG | 1916 | CUGUGCGA G GCGCGGCG | 4695 |
| 327 | CGCGCCGC GGCTAGCTACAACGA GCTCGCAC | 1917 | GUGCGAGC G GCGGCGCG | 4696 |
| 330 | CTTCGCGC GGCTAGCTACAACGA CGCGCTCG | 1918 | CGAGCGCG G GCGCGAAG | 4697 |
| 332 | TTCTTCGC GGCTAGCTACAACGA GCCGCGCT | 1919 | AGCGCGGC G GCGAAGAA | 4698 |
| 339 | CAGCACGT GGCTAGCTACAACGA TCTTCGCG | 1920 | CGCGAAGA A ACGUGCUG | 4699 |
| 341 | GCCAGCAC GGCTAGCTACAACGA GTTCTTCG | 1921 | CGAAGAAC G GUGCUGGC | 4700 |
| 343 | AGGCCAGC GGCTAGCTACAACGA ACGTTCTT | 1922 | AAGAACGU G GCUGGCCU | 4701 |
| 347 | CCGAAGGC GGCTAGCTACAACGA CAGCACGT | 1923 | ACGUGCUG G GCCUUCGG | 4702 |
| 354 | CGCGAAGC GGCTAGCTACAACGA CGAAGGCC | 1924 | GGCCUUCG G GCUUCGCG | 4703 |
| 359 | AGCAGCGC GGCTAGCTACAACGA GAAGCCGA | 1925 | UCGGCUUC G GCGCUGCU | 4704 |
| 361 | CCAGCAGC GGCTAGCTACAACGA GCGAAGCC | 1926 | GGCUUCGC G GCUGCUGG | 4705 |
| 364 | CGTCCAGC GGCTAGCTACAACGA AGCGCGAA | 1927 | UUCGCGCU G GCUGGACG | 4706 |
| 369 | GGCCCCGT GGCTAGCTACAACGA CCAGCAGC | 1928 | GCUGCUGG A ACGGGGCC | 4707 |
| 374 | CCGCGGGC GGCTAGCTACAACGA CCCGTCCA | 1929 | UGGACGGG G GCCCGCGG | 4708 |
| 378 | GCCCCCGC GGCTAGCTACAACGA GGGCCCCG | 1930 | CGGGGCCC G GCGGGGGC | 4709 |
| 384 | GGGGGGGC GGCTAGCTACAACGA CCCCGCGG | 1931 | CCGCGGGG G GCCCCCCC | 4710 |
| 395 | GTGAAGGC GGCTAGCTACAACGA CTCGGGGG | 1932 | CCCCCGAG G GCCUUCAC | 4711 |
| 401 | CTGGTGGT GGCTAGCTACAACGA GAAGGCCT | 1933 | AGGCCUUC A ACCACCAG | 4712 |
| 404 | ACGCTGGT GGCTAGCTACAACGA GGTGAAGG | 1934 | CCUUCACC A ACCAGCGU | 4713 |
| 408 | GCGCACGC GGCTAGCTACAACGA TGGTGGTG | 1935 | CACCACCA G GCGUGCGC | 4714 |
| 410 | CTGCGCAC GGCTAGCTACAACGA GCTGGTGG | 1936 | CCACCAGC G GUGCGCAG | 4715 |
| 412 | AGCTGCGC GGCTAGCTACAACGA ACGCTGGT | 1937 | ACCAGCGU G GCGCAGCU | 4716 |
| 414 | GTAGCTGC GGCTAGCTACAACGA GCACGCTG | 1938 | CAGCGUGC G GCAGCUAC | 4717 |
| 417 | CAGGTAGC GGCTAGCTACAACGA TGCGCACG | 1939 | CGUGCGCA G GCUACCUG | 4718 |
| 420 | GGGCAGGT GGCTAGCTACAACGA AGCTGCGC | 1940 | GCGCAGCU A ACCUGCCC | 4719 |
| 424 | TGTTGGGC GGCTAGCTACAACGA AGGTAGCT | 1941 | AGCUACCU G GCCCAACA | 4720 |
| 429 | CACCGTGT GGCTAGCTACAACGA TGGGCAGG | 1942 | CCUGCCCA A ACACGGUG | 4721 |
| 431 | GTCACCGT GGCTAGCTACAACGA GTTGGGCA | 1943 | UGCCCAAC A ACGGUGAC | 4722 |
| 434 | TCGGTCAC GGCTAGCTACAACGA CGTGTTGG | 1944 | CCAACACG G GUGACCGA | 4723 |
| 437 | GCGTCGGT GGCTAGCTACAACGA CACCGTGT | 1945 | ACACGGUG A ACCGACGC | 4724 |
| 441 | CAGTGCGT GGCTAGCTACAACGA CGGTCACC | 1946 | GGUGACCG A ACGCACUG | 4725 |
| 443 | CGCAGTGC GGCTAGCTACAACGA GTCGGTCA | 1947 | UGACCGAC G GCACUGCG | 4726 |
| 445 | CCCGCAGT GGCTAGCTACAACGA GCGTCGGT | 1948 | ACCGACGC A ACUGCGGG | 4727 |
| 448 | TCCCCCGC GGCTAGCTACAACGA AGTGCGTC | 1949 | GACGCACU G GCGGGGGA | 4728 |
| 456 | CGCCCCGC GGCTAGCTACAACGA TCCCCCGC | 1950 | GCGGGGGA G GCGGGGCG | 4729 |
| 461 | CCCCACGC GGCTAGCTACAACGA CCCGCTCC | 1951 | GGAGCGGG G GCGUGGGG | 4730 |
| 463 | GCCCCCAC GGCTAGCTACAACGA GCCCCGCT | 1952 | AGCGGGGC G GUGGGGGC | 4731 |
| 469 | GCAGCAGC GGCTAGCTACAACGA CCCCACGC | 1953 | GCGUGGGG G GCUGCUGC | 4732 |
| 472 | GCAGCAGC GGCTAGCTACAACGA AGCCCCCA | 1954 | UGGGGGCU G GCUGCUGC | 4733 |
| 475 | GGCGCAGC GGCTAGCTACAACGA AGCAGCCC | 1955 | GGGCUGCU G GCUGCGCC | 4734 |
| 478 | CGCGGCGC GGCTAGCTACAACGA AGCAGCAG | 1956 | CUGCUGCU G GCGCCGCG | 4735 |
| 480 | CACGCGGC GGCTAGCTACAACGA GCAGCAGC | 1957 | GCUGCUGC G GCCGCGUG | 4736 |
| 483 | GCCCACGC GGCTAGCTACAACGA GGCGCAGC | 1958 | GCUGCGCC G GCGUGGGC | 4737 |
| 485 | TCGCCCAC GGCTAGCTACAACGA GCGGCGCA | 1959 | UGCGCCGC G GUGGGCGA | 4738 |
| 489 | GTCGTCGC GGCTAGCTACAACGA CCACGCGG | 1960 | CCGCGUGG G GCGACGAC | 4739 |
| 492 | CACGTCGT GGCTAGCTACAACGA CGCCCACG | 1961 | CGUGGGCG A ACGACGUG | 4740 |
| 495 | CAGCACGT GGCTAGCTACAACGA CGTCGCCC | 1962 | GGGCGACG A ACGUGCUG | 4741 |
| 497 | ACCAGCAC GGCTAGCTACAACGA GTCGTCGC | 1963 | GCGACGAC C GUGCUGGU | 4742 |
| 499 | GAACCAGC GGCTAGCTACAACGA ACGTCGTC | 1964 | GACGACGU G GCUGGUUC | 4743 |
| 503 | AGGTGAAC GGCTAGCTACAACGA CAGCACGT | 1965 | ACGUGCUG G GUUCACCU | 4744 |
| 507 | CAGCAGGT GGCTAGCTACAACGA GAACCAGC | 1966 | GCUGGUUC A ACCUGCUG | 4745 |
| 511 | GTGCCAGC GGCTAGCTACAACGA AGGTGAAC | 1967 | GUUCACCU C GCUGGCAC | 4746 |
| 515 | CAGCGTGC GGCTAGCTACAACGA CAGCAGGT | 1968 | ACCUCCUG G GCACGCUG | 4747 |
| 517 | CGCAGCGT GGCTAGCTACAACGA GCCAGCAG | 1969 | CUGCUGGC A ACGCUGCG | 4748 |
| 519 | CGCGCAGC GGCTAGCTACAACGA GTGCCAGC | 1970 | GCUGGCAC G GCUGCGCG | 4749 |
| 522 | GAGCGCGC GGCTAGCTACAACGA AGCGTGCC | 1971 | GGCACGCU G GCGCGCUC | 4750 |
| 524 | AAGAGCGC GGCTAGCTACAACGA GCAGCGTG | 1972 | CACGCUGC G GCGCUCUU | 4751 |
| 526 | CAAAGAGC GGCTAGCTACAACGA GCGCAGCG | 1973 | CGCUGCGC C GCUCUUUG | 4752 |
| 533 | ACCAGCAC GGCTAGCTACAACGA AAAGAGCG | 1974 | CGCUCUUU G GUGCUGGU | 4753 |
| 535 | CCACCAGC GGCTAGCTACAACGA ACAAAGAG | 1975 | CUCUUUGU C GCUGGUGG | 4754 |
| 539 | GGAGCCAC GGCTAGCTACAACGA CAGCACAA | 1976 | UUGUGCUG C CUGGCUCC | 4755 |
| 542 | CTGGCAGC GGCTAGCTACAACGA CACCAGCA | 1977 | UCCUGGUG G CCUCCCAG | 4756 |
| 549 | GGCGCAGC GGCTAGCTACAACGA TGGGAGCC | 1978 | GGCUCCCA G GCUGCGCC | 4757 |
| 552 | GTAGGCGC GGCTAGCTACAACGA AGCTGGGA | 1979 | UCCCACCU G GCCCCUAC | 4758 |
| 554 | TGGTAGGC GGCTAGCTACAACGA GCAGCTGG | 1980 | CCAGCUGC G GCCUACCA | 4759 |
| 558 | CACCTGGT GGCTAGCTACAACGA AGGCGCAG | 1981 | CUGCGCCU A ACCAGGUG | 4760 |
| 563 | CCGCACAC GGCTAGCTACAACGA CTGGTAGG | 1982 | CCUACCAG G GUGUGCGG | 4761 |
| 565 | GCCCGCAC GGCTAGCTACAACGA ACCTGGTA | 1983 | UACCAGGU G GUGCGGGC | 4762 |
| 567 | CGGCCCGC GGCTAGCTACAACGA ACACCTGG | 1984 | CCAGGUGU G GCGGGCCG | 4763 |
| 571 | GCGGCGGC GGCTAGCTACAACGA CCGCACAC | 1985 | GUGUGCGG G GCCGCCGC | 4764 |
| 574 | ACAGCGGC GGCTAGCTACAACGA GGCCCGCA | 1986 | UGCGGGCC G GCCGCUGU | 4765 |
| 577 | GGTACAGC GGCTAGCTACAACGA GGCGGCCC | 1987 | GGGCCGCC G GCUGUACC | 4766 |
| 580 | GCTGGTAC GGCTAGCTACAACGA AGCGGCGG | 1988 | CCGCCGCU G GUACCAGC | 4767 |
| 582 | GAGCTGGT GGCTAGCTACAACGA ACAGCGGC | 1989 | GCCGCUGU A ACCAGCUC | 4768 |
| 586 | CGCCGAGC GGCTAGCTACAACGA TGGTACAG | 1990 | CUGUACCA G GCUCGGCG | 4769 |
| 591 | GGCAGCGC GGCTAGCTACAACGA CGAGCTGG | 1991 | CCAGCUCG G GCGCUGCC | 4770 |
| 593 | GTGGCAGC GGCTAGCTACAACGA GCCGAGCT | 1992 | AGCUCGGC G GCUGCCAC | 4771 |
| 596 | TGAGTGGC GGCTAGCTACAACGA AGCGCCGA | 1993 | UCGGCGCU G GCCACUCA | 4772 |
| 599 | GCCTGAGT GGCTAGCTACAACGA GGCAGCGC | 1994 | GCGCUGCC A ACUCAGGC | 4773 |
| 605 | GGCCGGGC GGCTAGCTACAACGA CTGAGTGG | 1995 | CCACUCAG G GCCCGGCC | 4774 |
| 610 | GCGGGGGC GGCTAGCTACAACGA CGGGCCTG | 1996 | CAGGCCCG G GCCCCCGC | 4775 |
| 616 | CGTGTGGC GGCTAGCTACAACGA GGGGGCCG | 1997 | CGGCCCCC G GCCACACG | 4776 |
| 619 | TAGCGTGT GGCTAGCTACAACGA GGCGGGGG | 1998 | CCCCCGCC A ACACGCUA | 4777 |
| 621 | ACTAGCGT GGCTAGCTACAACGA GTGGCGGG | 1999 | CCCGCCAC A ACGCUAGU | 4778 |
| 623 | CCACTAGC GGCTAGCTACAACGA GTGTGGCG | 2000 | CGCCACAC G GCUAGUGG | 4779 |
| 627 | GGGTCCAC GGCTAGCTACAACGA TAGCGTGT | 2001 | ACACGCUA G GUGGACCC | 4780 |
| 631 | TTCGGGGT GGCTAGCTACAACGA CCACTAGC | 2002 | GCUACUGG A ACCCCGAA | 4781 |
| 640 | CCACACGC GGCTAGCTACAACGA CTTCGGGG | 2003 | CCCCGAAG G GCGUCUGG | 4782 |
| 642 | TCCCAGAC GGCTAGCTACAACGA GCCTTCGG | 2004 | CCGAAGGC G GUCUGGGA | 4783 |
| 649 | GTTCGCAT GGCTAGCTACAACGA CCCAGACG | 2005 | CGUCUGGG A AUGCGAAC | 4784 |
| 651 | CCGTTCGC GGCTAGCTACAACGA ATCCCAGA | 2006 | UCUGGGAU G GCGAACGG | 4785 |
| 655 | AGGCCCGT GGCTAGCTACAACGA TCGCATCC | 2007 | GGAUGCGA A ACGGGCCU | 4786 |
| 659 | TTCCAGGC GGCTAGCTACAACGA CCGTTCGC | 2008 | GCGAACGG G GCCUGGAA | 4787 |
| 666 | GCTATGGT GGCTAGCTACAACGA TCCAGGCC | 2009 | GGCCUGGA A ACCAUAGC | 4788 |
| 669 | GACGCTAT GGCTAGCTACAACGA GGTTCCAG | 2010 | CUGGAACC A AUAGCGUC | 4789 |
| 672 | CCTGACGC GGCTAGCTACAACGA TATGGTTC | 2011 | GAACCAUA G GCGUCAGG | 4790 |
| 674 | TCCCTGAC GGCTAGCTACAACGA GCTATGGT | 2012 | ACCAUAGC G GUCAGGGA | 4791 |
| 683 | ACCCCGGC GGCTAGCTACAACGA CTCCCTGA | 2013 | UCAGGGAG G GCCGGGGU | 4792 |
| 689 | AGGGGGAC GGCTAGCTACAACGA CCCGGCCT | 2014 | AGGCCGGG G GUCCCCCU | 4793 |
| 699 | TGGCAGGC GGCTAGCTACAACGA CCAGGGGG | 2015 | CCCCCUGG G GCCUGCCA | 4794 |
| 703 | GGGCTGGC GGCTAGCTACAACGA AGGCCCAG | 2016 | CUGGGCCU G GCCAGCCC | 4795 |
| 707 | CCCGGGGC GGCTAGCTACAACGA TGGCAGGC | 2017 | GCCUGCCA G GCCCCGGG | 4796 |
| 714 | CCTCGCAC GGCTAGCTACAACGA CCGGGGCT | 2018 | AGCCCCGG G GUGCGAGG | 4797 |
| 716 | CTCCTCGC GGCTAGCTACAACGA ACCCGGGG | 2019 | CCCCGGGU G GCGAGGAG | 4798 |
| 724 | CCCCGCGC GGCTAGCTACAACGA CTCCTCGC | 2020 | GCGAGGAG G GCGCGGGG | 4799 |
| 726 | GCCCCCGC GGCTAGCTACAACGA GCCTCCTC | 2021 | GAGGAGGC G GCGGGGGC | 4800 |
| 732 | GGCACTGC GGCTAGCTACAACGA CCCCGCGC | 2022 | GCGCGGGG G GCAGUGCC | 4801 |
| 735 | GCTGGCAC GGCTAGCTACAACGA TGCCCCCG | 2023 | CGGGGGCA G GUGCCAGC | 4802 |
| 737 | CGGCTGGC GGCTAGCTACAACGA ACTGCCCC | 2024 | GGGGCAGU G GCCAGCCG | 4803 |
| 741 | ACTTCGGC GGCTAGCTACAACGA TGGCACTG | 2025 | CAGUGCCA G GCCGAAGU | 4804 |
| 747 | CGGCAGAC GGCTAGCTACAACGA TTCGGCTG | 2026 | CAGCCGAA G GUCUGCCG | 4805 |
| 751 | GCAACGGC GGCTAGCTACAACGA AGACTTCG | 2027 | CGAAGUCU G GCCGUUGC | 4806 |
| 754 | TGGGCAAC GGCTAGCTACAACGA GGCAGACT | 2028 | AGUCUGCC G GUUGCCCA | 4807 |
| 757 | TCTTGGGC GGCTAGCTACAACGA AACGGCAG | 2029 | CUGCCGUU G GCCCAAGA | 4808 |
| 766 | GCCTGGGC GGCTAGCTACAACGA CTCTTGGG | 2030 | CCCAAGAG G GCCCAGGC | 4809 |
| 772 | CGCCACGC GGCTAGCTACAACGA CTGGGCCT | 2031 | AGGCCCAG G GCGUGGCG | 4810 |
| 774 | AGCGCCAC GGCTAGCTACAACGA GCCTGGGC | 2032 | GCCCAGGC G GUGGCGCU | 4811 |
| 777 | GGCAGCGC GGCTAGCTACAACGA CACGCCTG | 2033 | CAGGCGUG G GCGCUGCC | 4812 |
| 779 | GGGGCAGC GGCTAGCTACAACGA GCCACGCC | 2034 | GGCGUGGC G GCUGCCCC | 4813 |
| 782 | TCAGGGGC GGCTAGCTACAACGA AGCGCCAC | 2035 | GUGGCGCU G GCCCCUGA | 4814 |
| 790 | GCTCCGGC GGCTAGCTACAACGA TCAGGGGC | 2036 | GCCCCUGA G GCCGGAGC | 4815 |
| 796 | GCGTCCGC GGCTAGCTACAACGA TCCGGCTC | 2037 | GAGCCGGA G GCGGACGC | 4816 |
| 800 | ACGGGCGT GGCTAGCTACAACGA CCGCTCCG | 2038 | CGGAGCGG A ACGCCCGU | 4817 |
| 802 | CAACGGGC GGCTAGCTACAACGA GTCCGCTC | 2039 | GAGCGGAC G GCCCGUUG | 4818 |
| 806 | TGCCCAAC GGCTAGCTACAACGA GGGCGTCC | 2040 | GGACGCCC G GUUGGGCA | 4819 |
| 811 | ACCCCTGC GGCTAGCTACAACGA CCAACGGG | 2041 | CCCGUUGG G GCAGGGGU | 4820 |
| 817 | CCCAGGAC GGCTAGCTACAACGA CCCTGCCC | 2042 | GGGCAGGG G GUCCUGGG | 4821 |
| 824 | GGGTGGGC GGCTAGCTACAACGA CCAGGACC | 2043 | GGUCCUGG G GCCCACCC | 4822 |
| 828 | GCCCGGGT GGCTAGCTACAACGA GGGCCCAG | 2044 | CUGGGCCC A ACCCGGGC | 4823 |
| 834 | CGTCCTGC GGCTAGCTACAACGA CCGGGTGG | 2045 | CCACCCGG G GCAGGACG | 4824 |
| 839 | CCACGCGT GGCTAGCTACAACGA CCTGCCCG | 2046 | CGGGCAGG A ACGCGUGG | 4825 |
| 841 | GTCCACGC GGCTAGCTACAACGA GTCCTGCC | 2047 | GGCAGGAC G GCGUGGAC | 4826 |
| 843 | CGGTCCAC GGCTAGCTACAACGA GCGTCCTG | 2048 | CAGGACGC G GUGGACCG | 4827 |
| 847 | CACTCGGT GGCTAGCTACAACGA CCACGCGT | 2049 | ACGCGUGG A ACCGAGUG | 4828 |
| 852 | ACGGTCAC GGCTAGCTACAACGA TCGGTCCA | 2050 | UGGACCGA G GUGACCGU | 4829 |
| 855 | ACCACGGT GGCTAGCTACAACGA CACTCGGT | 2051 | ACCGAGUG A ACCGUGGU | 4830 |
| 858 | GAAACCAC GGCTAGCTACAACGA GGTCACTC | 2052 | GAGUGACC G GUGGUUUC | 4831 |
| 861 | ACAGAAAC GGCTAGCTACAACGA CACGGTCA | 2053 | UGACCGUG G GUUUCUGU | 4832 |
| 867 | CACCACAC GGCTAGCTACAACGA AGAAACCA | 2054 | UGGUUUCU G GUGUGGUG | 4833 |
| 869 | GACACCAC GGCTAGCTACAACGA ACAGAAAC | 2055 | GUUUCUGU G GUGGUGUC | 4834 |
| 872 | GGTGACAC GGCTAGCTACAACGA CACACAGA | 2056 | UCUGUGUG G GUGUCACC | 4835 |
| 874 | CAGGTGAC GGCTAGCTACAACGA ACCACACA | 2057 | UGUGUGGU G GUCACCUG | 4836 |
| 877 | TGGCAGGT GGCTAGCTACAACGA GACACCAC | 2058 | GUGGUGUC A ACCUGCCA | 4837 |
| 881 | GGTCTGGC GGCTAGCTACAACGA AGGTGACA | 2059 | UGUCACCU G GCCAGACC | 4838 |
| 886 | CGGCGGGT GGCTAGCTACAACGA CTGGCAGG | 2060 | CCUGCCAG A ACCCGCCG | 4839 |
| 890 | TCTTCGGC GGCTAGCTACAACGA GGGTCTGG | 2061 | CCAGACCC G GCCGAAGA | 4840 |
| 899 | GAGGTGGC GGCTAGCTACAACGA TTCTTCGG | 2062 | CCGAAGAA G GCCACCUC | 4841 |
| 902 | AAAGAGGT GGCTAGCTACAACGA GGCTTCTT | 2063 | AAGAAGCC A ACCUCUUU | 4842 |
| 915 | GAGCGCAC GGCTAGCTACAACGA CCTCCAAA | 2064 | UUUGGAGG G GUGCGCUC | 4843 |
| 917 | GAGAGCGC GGCTAGCTACAACGA ACCCTCCA | 2065 | UGGAGGGU G GCGCUCUC | 4844 |
| 919 | CAGAGAGC GGCTAGCTACAACGA GCACCCTC | 2066 | GAGGGUGC G GCUCUCUG | 4845 |
| 927 | GCGCGTGC GGCTAGCTACAACGA CAGAGAGC | 2067 | GCUCUCUG G GCACGCGC | 4846 |
| 929 | TGGCGCGT GGCTAGCTACAACGA GCCAGAGA | 2068 | UCUCUGGC A ACGCGCCA | 4847 |
| 931 | AGTGGCGC GGCTAGCTACAACGA GTGCCAGA | 2069 | UCUGGCAC G GCGCCACU | 4848 |
| 933 | GGAGTGGC GGCTAGCTACAACGA GCGTGCCA | 2070 | UGGCACGC G GCCACUCC | 4849 |
| 936 | GTGGGAGT GGCTAGCTACAACGA GGCGCGTG | 2071 | CACGCGCC A ACUCCCAC | 4850 |
| 942 | GGATGGGT GGCTAGCTACAACGA GGGAGTGG | 2072 | CCACUCCC A ACCCAUCC | 4851 |
| 946 | CCACGGAT GGCTAGCTACAACGA GGGTGGGA | 2073 | UCCCACCC A AUCCGUGG | 4852 |
| 950 | CGGCCCAC GGCTAGCTACAACGA GGATGGGT | 2074 | ACCCAUCC G GUGGGCCG | 4853 |
| 954 | CTGGCGGC GGCTAGCTACAACGA CCACGGAT | 2075 | AUCCGUGG G GCCGCCAG | 4854 |
| 957 | GTGCTGGC GGCTAGCTACAACGA GGCCCACG | 2076 | CGUGGGCC G GCCAGCAC | 4855 |
| 961 | CGTGGTGC GGCTAGCTACAACGA TGGCGGCC | 2077 | GGCCGCCA G GCACCACG | 4856 |
| 963 | CGCGTGGT GGCTAGCTACAACGA GCTGGCGG | 2078 | CCGCCAGC A ACCACGCG | 4857 |
| 966 | GCCCGCGT GGCTAGCTACAACGA GGTGCTGG | 2079 | CCAGCACC A ACGCGGGC | 4858 |
| 968 | GGGCCCGC GGCTAGCTACAACGA GTGGTGCT | 2080 | AGCACCAC G GCGGGCCC | 4859 |
| 972 | TGGGGGGC GGCTAGCTACAACGA CCGCGTGG | 2081 | CCACGCGG G GCCCCCCA | 4860 |
| 979 | ATGTGGAT GGCTAGCTACAACGA GGGGGGCC | 2082 | GGCCCCCC A AUCCACAU | 4861 |
| 983 | CGCGATGT GGCTAGCTACAACGA GGATGGGG | 2083 | CCCCAUCC A ACAUCGCG | 4862 |
| 985 | GCCGCGAT GGCTAGCTACAACGA GTGGATGG | 2084 | CCAUCCAC A AUCGCGGC | 4863 |
| 988 | GTGGCCGC GGCTAGCTACAACGA GATGTGGA | 2085 | UCCACAUC G GCGGCCAC | 4864 |
| 991 | GTGGTGGC GGCTAGCTACAACGA CGCGATGT | 2086 | ACAUCGCG G GCCACCAC | 4865 |
| 994 | GACGTGGT GGCTAGCTACAACGA GGCCGCGA | 2087 | UCGCGGCC A ACCACGUC | 4866 |
| 997 | AGGGACGT GGCTAGCTACAACGA GGTGGCCG | 2088 | CGGCCACC A ACGUCCCU | 4867 |
| 999 | CCAGGGAC GGCTAGCTACAACGA GTGGTGGC | 2089 | GCCACCAC G GUCCCUGG | 4868 |
| 1008 | AGGCGTGT GGCTAGCTACAACGA CCCAGGGA | 2090 | UCCCUGGG A ACACGCCU | 4869 |
| 1010 | CAAGGCGT GGCTAGCTACAACGA GTCCCAGG | 2091 | CCUGGGAC A ACGCCUUG | 4870 |
| 1012 | GACAAGGC GGCTAGCTACAACGA GTGTCCCA | 2092 | UGGGACAC G GCCUUGUC | 4871 |
| 1017 | CGGGGGAC GGCTAGCTACAACGA AAGGCGTG | 2093 | CACGCCUU G GUCCCCCG | 4872 |
| 1025 | GCGTACAC GGCTAGCTACAACGA CGGGGGAC | 2094 | GUCCCCCG G GUGUACGC | 4873 |
| 1027 | CGGCGTAC GGCTAGCTACAACGA ACCGGGGG | 2095 | CCCCCGGU G GUACGCCG | 4874 |
| 1029 | CTCGGCGT GGCTAGCTACAACGA ACACCGGG | 2096 | CCCGGUGU A ACGCCGAG | 4875 |
| 1031 | GTCTCGGC GGCTAGCTACAACGA GTACACCG | 2097 | CGGUGUAC G GCCGAGAC | 4876 |
| 1037 | TGCTTGGT GGCTAGCTACAACGA CTCGGCGT | 2098 | ACGCCGAG A ACCAAGCA | 4877 |
| 1042 | GGAAGTGC GGCTAGCTACAACGA TTGGTCTC | 2099 | GAGACCAA G GCACUUCC | 4878 |
| 1044 | GAGGAAGT GGCTAGCTACAACGA GCTTGGTC | 2100 | GACCAAGC A ACUUCCUC | 4879 |
| 1053 | TGAGGAGT GGCTAGCTACAACGA AGAGGAAG | 2101 | CUUCCUCU A ACUCCUCA | 4880 |
| 1062 | CTTGTCGC GGCTAGCTACAACGA CTGAGGAG | 2102 | CUCCUCAG G GCGACAAG | 4881 |
| 1065 | CTCCTTGT GGCTAGCTACAACGA CGCCTGAG | 2103 | CUCAGGCG A ACAAGGAG | 4882 |
| 1072 | GCAGCTGC GGCTAGCTACAACGA TCCTTGTC | 2104 | GACAAGGA G GCAGCUGC | 4883 |
| 1075 | GCCGCAGC GGCTAGCTACAACGA TGCTCCTT | 2105 | AAGGAGCA G GCUGCGGC | 4884 |
| 1078 | AGGGCCGC GGCTAGCTACAACGA AGCTGCTC | 2106 | GAGCAGCU G GCGGCCCU | 4885 |
| 1081 | AGGAGGGC GGCTAGCTACAACGA CGCAGCTG | 2107 | CAGCUGCG G GCCCUCCU | 4886 |
| 1093 | AGCTGAGT GGCTAGCTACAACGA AGGAAGGA | 2108 | UCCUUCCU A ACUCAGCU | 4887 |
| 1098 | CAGAGAGC GGCTAGCTACAACGA TGAGTAGG | 2109 | CCUACUCA G GCUCUCUG | 4888 |
| 1108 | GGCTGGGC GGCTAGCTACAACGA CTCAGAGA | 2110 | UCUCUGAG G GCCCAGCC | 4889 |
| 1113 | AGTCAGGC GGCTAGCTACAACGA TGGGCCTC | 2111 | GAGGCCCA G GCCUGACU | 4890 |
| 1118 | GCGCCAGT GGCTAGCTACAACGA CAGGCTGG | 2112 | CCAGCCUG A ACUGGCGC | 4891 |
| 1122 | CCGAGCGC GGCTAGCTACAACGA CAGTCAGG | 2113 | CCUGACUG G GCGCUCGG | 4892 |
| 1124 | CTCCGAGC GGCTAGCTACAACGA GCCAGTCA | 2114 | UGACUGGC G GCUCGGAG | 4893 |
| 1132 | CCACGAGC GGCTAGCTACAACGA CTCCGAGC | 2115 | GCUCGGAG G GCUCGUGG | 4894 |
| 1136 | GTCTCCAC GGCTAGCTACAACGA GAGCCTCC | 2116 | GGAGGCUC G GUGGAGAC | 4895 |
| 1142 | AAGATGGT GGCTAGCTACAACGA CTCCACGA | 2117 | UCGUGGAG A ACCAUCUU | 4896 |
| 1145 | AGAAAGAT GGCTAGCTACAACGA GGTCTCCA | 2118 | UGGAGACC A AUCUUUCU | 4897 |
| 1155 | CCTGGAAC GGCTAGCTACAACGA CCAGAAAG | 2119 | CUUUCUGG G GUUCCAGG | 4898 |
| 1162 | TCCAGGGC GGCTAGCTACAACGA CTGGAACC | 2120 | GGUUCCAG G GCCCUGGA | 4899 |
| 1169 | CCTGGCAT GGCTAGCTACAACGA CCAGGGCC | 2121 | GGCCCUGG A AUGCCAGG | 4900 |
| 1171 | TCCCTGGC GGCTAGCTACAACGA ATCCAGGG | 2122 | CCCUGGAU G GCCAGGGA | 4901 |
| 1178 | CGGGGAGT GGCTAGCTACAACGA CCCTGGCA | 2123 | UGCCAGGG A ACUCCCCG | 4902 |
| 1185 | CAACCTGC GGCTAGCTACAACGA GGGGAGTC | 2124 | GACUCCCC G GCAGGUUG | 4903 |
| 1189 | GGGGCAAC GGCTAGCTACAACGA CTGCGGGG | 2125 | CCCCGCAG G GUUGCCCC | 4904 |
| 1192 | GGCGGGGC GGCTAGCTACAACGA AACCTGCG | 2126 | CGCAGGUU G GCCCCGCC | 4905 |
| 1197 | GGGCAGGC GGCTAGCTACAACGA GGGGCAAC | 2127 | GUUGCCCC G GCCUGCCC | 4906 |
| 1201 | GCTGGGGC GGCTAGCTACAACGA AGGCGGGG | 2128 | CCCCGCCU G GCCCCAGC | 4907 |
| 1207 | AGTAGCGC GGCTAGCTACAACGA TGGGGCAG | 2129 | CUGCCCCA G GCGCUACU | 4908 |
| 1209 | CCAGTAGC GGCTAGCTACAACGA GCTGGGGC | 2130 | GCCCCAGC G GCUACUGG | 4909 |
| 1212 | TTGCCAGT GGCTAGCTACAACGA AGCGCTGG | 2131 | CCAGCGCU A ACUGGCAA | 4910 |
| 1216 | GCATTTGC GGCTAGCTACAACGA CAGTAGCG | 2132 | CGCUACUG G GCAAAUGC | 4911 |
| 1220 | GGCCGCAT GGCTAGCTACAACGA TTGCCAGT | 2133 | ACUGGCAA A AUGCGGCC | 4912 |
| 1222 | GGGGCCGC GGCTAGCTACAACGA ATTTGCCA | 2134 | UGGCAAAU G GCGGCCCC | 4913 |
| 1225 | ACAGGGGC GGCTAGCTACAACGA CGCATTTG | 2135 | CAAAUGCG G GCCCCUGU | 4914 |
| 1231 | CCAGAAAC GGCTAGCTACAACGA AGGGGCCG | 2136 | CGGCCCCU G GUUUCUGG | 4915 |
| 1240 | CAAGCAGC GGCTAGCTACAACGA TCCAGAAA | 2137 | UUUCUGGA G GCUGCUUG | 4916 |
| 1243 | TCCCAAGC GGCTAGCTACAACGA AGCTCCAG | 2138 | CUGGAGCU G GCUUGGGA | 4917 |
| 1251 | CGCGTGGT GGCTAGCTACAACGA TCCCAAGC | 2139 | GCUUGGGA A ACCACGCG | 4918 |
| 1254 | CTGCGCGT GGCTAGCTACAACGA GGTTCCCA | 2140 | UGGGAACC A ACGCGCAG | 4919 |
| 1256 | CACTGCGC GGCTAGCTACAACGA GTGGTTCC | 2141 | GGAACCAC G GCGCAGUG | 4920 |
| 1258 | GGCACTGC GGCTAGCTACAACGA GCGTGGTT | 2142 | AACCACGC G GCAGUGCC | 4921 |
| 1261 | AGGGGCAC GGCTAGCTACAACGA TGCGCGTG | 2143 | CACGCGCA G GUGCCCCU | 4922 |
| 1263 | GTAGGGGC GGCTAGCTACAACGA ACTGCGCG | 2144 | CGCGCAGU G GCCCCUAC | 4923 |
| 1269 | CACCCCGT GGCTAGCTACAACGA AGGGGCAC | 2145 | GUGCCCCU A ACGGGGUG | 4924 |
| 1274 | AGGAGCAC GGCTAGCTACAACGA CCCGTAGG | 2146 | CCUACGGG G GUGCUCCU | 4925 |
| 1276 | TGAGGAGC GGCTAGCTACAACGA ACCCCGTA | 2147 | UACGGGGU G GCUCCUCA | 4926 |
| 1286 | CAGTGCGT GGCTAGCTACAACGA CTTGAGGA | 2148 | UCCUCAAG A ACGCACUG | 4927 |
| 1288 | GGCAGTGC GGCTAGCTACAACGA GTCTTGAG | 2149 | CUCAAGAC G GCACUGCC | 4928 |
| 1290 | CGGGCAGT GGCTAGCTACAACGA GCGTCTTG | 2150 | CAAGACGC A ACUGCCCG | 4929 |
| 1293 | CAGCGGGC GGCTAGCTACAACGA AGTGCGTC | 2151 | GACGCACU G GCCCGCUG | 4930 |
| 1297 | CTCGCAGC GGCTAGCTACAACGA GGGCAGTG | 2152 | CACUGCCC G GCUGCGAG | 4931 |
| 1300 | CAGCTCGC GGCTAGCTACAACGA AGCGGGCA | 2153 | UGCCCGCU G GCGAGCUG | 4932 |
| 1304 | ACCGCAGC GGCTAGCTACAACGA TCGCAGCG | 2154 | CGCUGCGA G GCUGCGGU | 4933 |
| 1307 | GTGACCGC GGCTAGCTACAACGA AGCTCGCA | 2155 | UGCGAGCU G GCGGUCAC | 4934 |
| 1310 | GGGGTGAC GGCTAGCTACAACGA CGCAGCTC | 2156 | GAGCUGCG G GUCACCCC | 4935 |
| 1313 | GCTGGGGT GGCTAGCTACAACGA GACCGCAG | 2157 | CUGCGGUC A ACCCCAGC | 4936 |
| 1319 | CCGGCTGC GGCTAGCTACAACGA TGGGGTGA | 2158 | UCACCCCA G GCAGCCGG | 4937 |
| 1322 | ACACCGGC GGCTAGCTACAACGA TGCTGGGG | 2159 | CCCCAGCA G GCCGGUGU | 4938 |
| 1326 | ACAGACAC GGCTAGCTACAACGA CGGCTGCT | 2160 | AGCAGCCG G GUGUCUGU | 4939 |
| 1328 | GCACAGAC GGCTAGCTACAACGA ACCGGCTG | 2161 | CAGCCGGU G GUCUGUGC | 4940 |
| 1332 | CCGGGCAC GGCTAGCTACAACGA AGACACCG | 2162 | CGGUGUCU G GUGCCCGG | 4941 |
| 1334 | TCCCGGGC GGCTAGCTACAACGA ACAGACAC | 2163 | GUGUCUGU G GCCCGGGA | 4942 |
| 1345 | CCTGGGGC GGCTAGCTACAACGA TTCTCCCG | 2164 | CGGGAGAA G GCCCCAGG | 4943 |
| 1353 | CACAGAGC GGCTAGCTACAACGA CCTGGGGC | 2165 | GCCCCAGG G GCUCUGUG | 4944 |
| 1358 | GCCGCCAC GGCTAGCTACAACGA AGAGCCCT | 2166 | AGGGCUCU G GUGGCGGC | 4945 |
| 1361 | GGGGCCGC GGCTAGCTACAACGA CACAGAGC | 2167 | GCUCUGUG G GCGGCCCC | 4946 |
| 1364 | TCGGGGGC GGCTAGCTACAACGA CGCCACAG | 2168 | CUGUGGCG G GCCCCCGA | 4947 |
| 1380 | GTCTGTGT GGCTAGCTACAACGA CCTCCTCC | 2169 | GGAGGAGG A ACACAGAC | 4948 |
| 1382 | GGGTCTGT GGCTAGCTACAACGA GTCCTCCT | 2170 | AGGAGGAC A ACAGACCC | 4949 |
| 1386 | ACGGGGGT GGCTAGCTACAACGA CTGTGTCC | 2171 | GGACACAG A ACCCCCGU | 4950 |
| 1392 | CAGGCGAC GGCTAGCTACAACGA GGGGGTCT | 2172 | AGACCCCC G GUCGCCUG | 4951 |
| 1395 | CACCAGGC GGCTAGCTACAACGA GACGGGGG | 2173 | CCCCCGUC G GCCUGGUG | 4952 |
| 1400 | AGCTGCAC GGCTAGCTACAACGA CAGGCGAC | 2174 | GUCGCCUG G GUGCAGCU | 4953 |
| 1402 | GCAGCTGC GGCTAGCTACAACGA ACCAGGCG | 2175 | CGCCUGGU G GCAGCUGC | 4954 |
| 1405 | GGAGCAGC GGCTAGCTACAACGA TGCACCAG | 2176 | CUGGUGCA G GCUGCUCC | 4955 |
| 1408 | GGCGGAGC GGCTAGCTACAACGA AGCTGCAC | 2177 | GUGCAGCU G GCUCCGCC | 4956 |
| 1413 | GTGCTGGC GGCTAGCTACAACGA GGAGCAGC | 2178 | GCUGCUCC G GCCAGCAC | 4957 |
| 1417 | TGCTGTGC GGCTAGCTACAACGA TGGCGGAG | 2179 | CUCCGCCA G GCACAGCA | 4958 |
| 1419 | GCTGCTGT GGCTAGCTACAACGA GCTGGCGG | 2180 | CCGCCAGC A ACAGCAGC | 4959 |
| 1422 | GGGGCTGC GGCTAGCTACAACGA TGTGCTGG | 2181 | CCAGCACA G GCAGCCCC | 4960 |
| 1425 | CCAGGGGC GGCTAGCTACAACGA TGCTGTGC | 2182 | GCACAGCA G GCCCCUGG | 4961 |
| 1432 | ACACCTGC GGCTAGCTACAACGA CAGGGGCT | 2183 | AGCCCCUG G GCAGGUGU | 4962 |
| 1436 | CCGTACAC GGCTAGCTACAACGA CTGCCAGG | 2184 | CCUGGCAG G GUGUACGG | 4963 |
| 1438 | AGCCGTAC GGCTAGCTACAACGA ACCTGCCA | 2185 | UGGCAGGU G GUACGGCU | 4964 |
| 1440 | GAAGCCGT GGCTAGCTACAACGA ACACCTGC | 2186 | GCAGGUGU A ACGGCUUC | 4965 |
| 1443 | CACGAAGC GGCTAGCTACAACGA CGTACACC | 2187 | GGUGUACG G GCUUCGUG | 4966 |
| 1448 | GCCCGCAC GGCTAGCTACAACGA GAAGCCGT | 2188 | ACGGCUUC G GUGCGGGC | 4967 |
| 1450 | AGGCCCGC GGCTAGCTACAACGA ACGAAGCC | 2189 | GGCUUCGU G GCGGGCCU | 4968 |
| 1454 | AGGCAGGC GGCTAGCTACAACGA CCGCACGA | 2190 | UCGUGCGG G GCCUGCCU | 4969 |
| 1458 | GCGCAGGC GGCTAGCTACAACGA AGGCCCGC | 2191 | GCGGGCCU G GCCUGCGC | 4970 |
| 1462 | GCCGGCGC GGCTAGCTACAACGA AGGCAGGC | 2192 | GCCUGCCU G GCGCCGGC | 4971 |
| 1464 | CAGCCGGC GGCTAGCTACAACGA GCAGGCAG | 2193 | CUGCCUGC G GCCGGCUG | 4972 |
| 1468 | GCACCAGC GGCTAGCTACAACGA CGGCGCAG | 2194 | CUGCGCCG G GCUGGUGC | 4973 |
| 1472 | GGGGGCAC GGCTAGCTACAACGA CAGCCGGC | 2195 | GCCGGCUG G GUGCCCCC | 4974 |
| 1474 | CTGGGGGC GGCTAGCTACAACGA ACCAGCCG | 2196 | CGGCUGGU G GCCCCCAG | 4975 |
| 1482 | CCAGAGGC GGCTAGCTACAACGA CTGGGGGC | 2197 | GCCCCCAG G GCCUCUGG | 4976 |
| 1491 | CCTGGAGC GGCTAGCTACAACGA CCCAGAGG | 2198 | CCUCUGGG G GCUCCAGG | 4977 |
| 1498 | CGTTGTGC GGCTAGCTACAACGA CTGGAGCC | 2199 | GGCUCCAG G GCACAACG | 4978 |
| 1500 | TTCGTTGT GGCTAGCTACAACGA GCCTGGAG | 2200 | CUCCAGGC A ACAACGAA | 4979 |
| 1503 | GCGTTCGT GGCTAGCTACAACGA TGTGCCTG | 2201 | CAGGCACA A ACGAACGC | 4980 |
| 1507 | AGCGGCGT GGCTAGCTACAACGA TCGTTGTG | 2202 | CACAACGA A ACGCCGCU | 4981 |
| 1509 | GAAGCGGC GGCTAGCTACAACGA GTTCGTTG | 2203 | CAACGAAC G GCCGCUUC | 4982 |
| 1512 | GAGGAAGC GGCTAGCTACAACGA GGCGTTCG | 2204 | CGAACGCC G GCUUCCUC | 4983 |
| 1524 | CTTGGTGT GGCTAGCTACAACGA TCCTGAGG | 2205 | CCUCAGGA A ACACCAAG | 4984 |
| 1526 | TTCTTGGT GGCTAGCTACAACGA GTTCCTGA | 2206 | UCAGGAAC A ACCAAGAA | 4985 |
| 1534 | AGATGAAC GGCTAGCTACAACGA TTCTTGGT | 2207 | ACCAAGAA G GUUCAUCU | 4986 |
| 1538 | AGGGAGAT GGCTAGCTACAACGA GAACTTCT | 2208 | AGAAGUUC A AUCUCCCU | 4987 |
| 1552 | TGGCATGC GGCTAGCTACAACGA TTCCCCAG | 2209 | CUGGGGAA G GCAUGCCA | 4988 |
| 1554 | CTTGGCAT GGCTAGCTACAACGA GCTTCCCC | 2210 | GGGGAAGC A AUGCCAAG | 4989 |
| 1556 | AGCTTGGC GGCTAGCTACAACGA ATGCTTCC | 2211 | GGAAGCAU G GCCAAGCU | 4990 |
| 1561 | GCGAGAGC GGCTAGCTACAACGA TTGGCATG | 2212 | CAUGCCAA G GCUCUCGC | 4991 |
| 1567 | CCTGCAGC GGCTAGCTACAACGA GAGAGCTT | 2213 | AAGCUCUC G GCUGCAGG | 4992 |
| 1570 | GCTCCTGC GGCTAGCTACAACGA AGCGAGAG | 2214 | CUCUCGCU G GCAGGAGC | 4993 |
| 1576 | ACGTCAGC GGCTAGCTACAACGA TCCTGCAG | 2215 | CUGCAGGA G GCUGACCU | 4994 |
| 1580 | TTCCACGT GGCTAGCTACAACGA CAGCTCCT | 2216 | AGGAGCUG A ACGUGGAA | 4995 |
| 1582 | TCTTCCAC GGCTAGCTACAACGA GTCAGCTC | 2217 | GAGCUGAC G GUGGAAGA | 4996 |
| 1589 | ACGCTCAT GGCTAGCTACAACGA CTTCCACG | 2218 | CGUCGAAG A AUGACCGU | 4997 |
| 1593 | CCGCACGC GGCTAGCTACAACGA TCATCTTC | 2219 | GAAGAUGA G GCGUGCGG | 4998 |
| 1595 | TCCCGCAC GGCTAGCTACAACGA GCTCATCT | 2220 | AGAUGAGC G GUGCGGGA | 4999 |
| 1597 | AGTCCCGC GGCTAGCTACAACGA ACGCTCAT | 2221 | AUGAGCGU G GCGGGACU | 5000 |
| 1602 | AGCGCAGT GGCTAGCTACAACGA CCCGCACG | 2222 | CGUGCGGG A ACUGCGCU | 5001 |
| 1605 | CCAAGCGC GGCTAGCTACAACGA AGTCCCGC | 2223 | GCGGGACU G GCGCUUGG | 5002 |
| 1607 | AGCCAAGC GGCTAGCTACAACGA GCAGTCCC | 2224 | GGGACUGC G GCUUGGCU | 5003 |
| 1612 | TGCGCAGC GGCTAGCTACAACGA CAAGCGCA | 2225 | UGCGCUUG G GCUGCGCA | 5004 |
| 1615 | TCCTGCGC GGCTAGCTACAACGA AGCCAAGC | 2226 | GCUUGGCU G GCGCAGGA | 5005 |
| 1617 | GCTCCTGC GGCTAGCTACAACGA GCAGCCAA | 2227 | UUGGCUGC G GCAGGAGC | 5006 |
| 1623 | CCCTGGGC GGCTAGCTACAACGA TCCTGCGC | 2228 | GCGCAGGA G GCCCAGGG | 5007 |
| 1631 | CAGCCAAC GGCTAGCTACAACGA CCCTGGGC | 2229 | GCCCAGGG G GUUGGCUG | 5008 |
| 1635 | AACACACC GGCTAGCTACAACGA CAACCCCT | 2230 | AGGGGUUG G GCUGUGUU | 5009 |
| 1638 | CCGAACAC GGCTAGCTACAACGA AGCCAACC | 2231 | CGUUGGCU G GUGUUCCG | 5010 |
| 1640 | GCCGGAAC GGCTAGCTACAACGA ACAGCCAA | 2232 | UUGGCUGU G GUUCCGGC | 5011 |
| 1646 | TCTGCGGC GGCTAGCTACAACGA CGGAACAC | 2233 | GUGUUCCG G GCCGCAGA | 5012 |
| 1649 | TGCTCTGC GGCTAGCTACAACGA GGCCGGAA | 2234 | UUCCGGCC G GCAGAGCA | 5013 |
| 1654 | GACGGTGC GGCTAGCTACAACGA TCTGCGGC | 2235 | GCCGCAGA G GCACCGUC | 5014 |
| 1656 | CAGACGGT GGCTAGCTACAACGA GCTCTGCG | 2236 | CGCAGAGC A ACCGUCUG | 5015 |
| 1659 | ACGCAGAC GGCTAGCTACAACGA GGTGCTCT | 2237 | AGAGCACC G GUCUGCGU | 5016 |
| 1663 | CCTCACGC GGCTAGCTACAACGA AGACGGTG | 2238 | CACCGUCU G GCGUGAGG | 5017 |
| 1665 | CTCCTCAC GGCTAGCTACAACGA GCAGACGG | 2239 | CCGUCUGC G GUGAGGAG | 5018 |
| 1673 | GCCAGGAT GGCTAGCTACAACGA CTCCTCAC | 2240 | GUGAGGAG A AUCCUGGC | 5019 |
| 1679 | AACTTGGC GGCTAGCTACAACGA CAGGATCT | 2241 | AGAUCCUG G GCCAAGUU | 5020 |
| 1684 | GCAGGAAC GGCTAGCTACAACGA TTGGCCAG | 2242 | CUGGCCAA G GUUCCUGC | 5021 |
| 1690 | GCCAGTGC GGCTAGCTACAACGA AGGAACTT | 2243 | AAGUUCCU G GCACUGGC | 5022 |
| 1692 | CAGCCAGT GGCTAGCTACAACGA GCAGGAAC | 2244 | GUUCCUGC A ACUGGCUG | 5023 |
| 1696 | TCATCAGC GGCTAGCTACAACGA CAGTGCAG | 2245 | CUGCACUG G GCUGAUGA | 5024 |
| 1700 | ACACTCAT GGCTAGCTACAACGA CAGCCAGT | 2246 | ACUGGCUG A AUGAGUGU | 5025 |
| 1704 | GTACACAC GGCTAGCTACAACGA TCATCAGC | 2247 | GCUGAUGA G GUGUGUAC | 5026 |
| 1706 | ACGTACAC GGCTAGCTACAACGA ACTCATCA | 2248 | UGAUGAGU G GUGUACGU | 5027 |
| 1708 | CGACGTAC GGCTAGCTACAACGA ACACTCAT | 2249 | AUGAGUGU G GUACGUCG | 5028 |
| 1710 | GACGACGT GGCTAGCTACAACGA ACACACTC | 2250 | GAGUGUGU A ACGUCGUC | 5029 |
| 1712 | TCGACGAC GGCTAGCTACAACGA GTACACAC | 2251 | GUGUGUAC G GUCGUCGA | 5030 |
| 1715 | AGCTCGAC GGCTAGCTACAACGA GACGTACA | 2252 | UGUACGUC G GUCGAGCU | 5031 |
| 1720 | TGAGCAGC GGCTAGCTACAACGA TCGACGAC | 2253 | GUCGUCGA G GCUGCUCA | 5032 |
| 1723 | ACCTGAGC GGCTAGCTACAACGA AGCTCGAC | 2254 | GUCGAGCU G GCUCAGGU | 5033 |
| 1729 | AGAAAGAC GGCTAGCTACAACGA CTGAGCAG | 2255 | CUGCUCAG G GUCUUUCU | 5034 |
| 1740 | CGTGACAT GGCTAGCTACAACGA AAAAGAAA | 2256 | UUUCUUUU A AUGUCACG | 5035 |
| 1742 | TCCGTGAC GGCTAGCTACAACGA ATAAAAGA | 2257 | UCUUUUAU G GUCACGGA | 5036 |
| 1745 | GTCTCCGT GGCTAGCTACAACGA GACATAAA | 2258 | UUUAUGUC A ACGGAGAC | 5037 |
| 1751 | AACGTGGT GGCTAGCTACAACGA CTCCGTGA | 2259 | UCACGGAG A ACCACGUU | 5038 |
| 1754 | TGAAACGT GGCTAGCTACAACGA GGTCTCCG | 2260 | CGGAGACC A ACGUUUCA | 5039 |
| 1756 | TTTGAAAC GGCTAGCTACAACGA GTGGTCTC | 2261 | GAGACCAC G GUUUCAAA | 5040 |
| 1767 | GAGCCTGT GGCTAGCTACAACGA TCTTTTGA | 2262 | UCAAAAGA A ACAGGCUC | 5041 |
| 1771 | AAAAGAGC GGCTAGCTACAACGA CTGTTCTT | 2263 | AAGAACAG G GCUCUUUU | 5042 |
| 1782 | CTTCCGGT GGCTAGCTACAACGA AGAAAAAG | 2264 | CUUUUUCU A ACCGGAAG | 5043 |
| 1791 | CCAGACAC GGCTAGCTACAACGA TCTTCCGG | 2265 | CCGGAAGA G GUGUCUGG | 5044 |
| 1793 | CTCCAGAC GGCTAGCTACAACGA ACTCTTCC | 2266 | GGAAGAGU G GUCUGGAG | 5045 |
| 1800 | CAACTTGC GGCTAGCTACAACGA TCCAGACA | 2267 | UGUCUGGA G GCAAGUUG | 5046 |
| 1804 | TTTGCAAC GGCTAGCTACAACGA TTGCTCCA | 2268 | UGGAGCAA G GUUGCAAA | 5047 |
| 1807 | TGCTTTGC GGCTAGCTACAACGA AACTTGCT | 2269 | AGCAAGUU G GCAAAGCA | 5048 |
| 1812 | TCCAATGC GGCTAGCTACAACGA TTTGCAAC | 2270 | GUUGCAAA G GCAUUGGA | 5049 |
| 1814 | ATTCCAAT GGCTAGCTACAACGA GCTTTGCA | 2271 | UGCAAAGC A AUUGGAAU | 5050 |
| 1820 | TGTCTGAT GGCTAGCTACAACGA TCCAATGC | 2272 | GCAUUGGA A AUCAGACA | 5051 |
| 1825 | AGTGCTGT GGCTAGCTACAACGA CTGATTCC | 2273 | GGAAUCAG A ACAGCACU | 5052 |
| 1828 | TCAAGTGC GGCTAGCTACAACGA TGTCTGAT | 2274 | AUCAGACA G GCACUUGA | 5053 |
| 1830 | CTTCAAGT GGCTAGCTACAACGA GCTGTCTG | 2275 | CAGACAGC A ACUUGAAG | 5054 |
| 1841 | AGCTGCAC GGCTAGCTACAACGA CCTCTTCA | 2276 | UGAAGAGG G GUGCAGCU | 5055 |
| 1843 | GCAGCTGC GGCTAGCTACAACGA ACCCTCTT | 2277 | AAGAGGGU G GCAGCUGC | 5056 |
| 1846 | CCCGCAGC GGCTAGCTACAACGA TGCACCCT | 2278 | AGGGUGCA G GCUGCGGG | 5057 |
| 1849 | GCTCCCGC GGCTAGCTACAACGA AGCTGCAC | 2279 | GUGCAGCU G GCGGGAGC | 5058 |
| 1855 | CCGACAGC GGCTAGCTACAACGA TCCCGCAG | 2280 | CUGCGGGA G GCUGUCGG | 5059 |
| 1858 | CTTCCGAC GGCTAGCTACAACGA AGCTCCCG | 2281 | CGGGAGCU G GUCGGAAG | 5060 |
| 1865 | ACCTCTGC GGCTAGCTACAACGA TTCCGACA | 2282 | UGUCGGAA G GCAGAGGU | 5061 |
| 1871 | TGCCTGAC GGCTAGCTACAACGA CTCTGCTT | 2283 | AAGCAGAG G GUCAGGCA | 5062 |
| 1876 | GATGCTGC GGCTAGCTACAACGA CTGACCTC | 2284 | GAGGUCAG G GCAGCAUC | 5063 |
| 1879 | CCCGATGC GGCTAGCTACAACGA TGCCTGAC | 2285 | GUCAGGCA G GCAUCGGG | 5064 |
| 1881 | TTCCCGAT GGCTAGCTACAACGA GCTGCCTG | 2286 | CAGGCAGC A AUCGGGAA | 5065 |
| 1889 | GGCCTGGC GGCTAGCTACAACGA TTCCCGAT | 2287 | AUCGGGAA G GCCAGGCC | 5066 |
| 1894 | GGGCGGGC GGCTAGCTACAACGA CTGGCTTC | 2288 | GAAGCCAG G GCCCGCCC | 5067 |
| 1898 | AGCAGGGC GGCTAGCTACAACGA GGGCCTGG | 2289 | CCAGGCCC G GCCCUGCU | 5068 |
| 1903 | ACGTCAGC GGCTAGCTACAACGA AGGGCGGG | 2290 | CCCGCCCU G GCUGACGU | 5069 |
| 1907 | CTGGACGT GGCTAGCTACAACGA CAGCAGGG | 2291 | CCCUGCUG A ACGUCCAG | 5070 |
| 1909 | GTCTGGAC GGCTAGCTACAACGA GTCAGCAG | 2292 | CUGCUGAC G GUCCAGAC | 5071 |
| 1915 | AGCGGAGT GGCTAGCTACAACGA CTGGACGT | 2293 | ACGUCCAG A ACUCCGCU | 5072 |
| 1920 | GATGAAGC GGCTAGCTACAACGA GGAGTCTG | 2294 | CAGACUCC G GCUUCAUC | 5073 |
| 1925 | TTGGGGAT GGCTAGCTACAACGA GAAGCGGA | 2295 | UCCGCUUC A AUCCCCAA | 5074 |
| 1933 | CGTCAGGC GGCTAGCTACAACGA TTGGGGAT | 2296 | AUCCCCAA G GCCUGACG | 5075 |
| 1938 | CAGCCCGT GGCTAGCTACAACGA CAGGCTTG | 2297 | CAAGCCUG A ACGGGCUG | 5076 |
| 1942 | GCCGCAGC GGCTAGCTACAACGA CCGTCAGG | 2298 | CCUGACGG G GCUGCGGC | 5077 |
| 1945 | TCGGCCGC GGCTAGCTACAACGA AGCCCGTC | 2299 | GACGGGCU G GCGGCCGA | 5078 |
| 1948 | CAATCGGC GGCTAGCTACAACGA CGCAGCCC | 2300 | GGGCUGCG G GCCGAUUG | 5079 |
| 1952 | TTCACAAT GGCTAGCTACAACGA CGGCCGCA | 2301 | UGCGGCCG A AUUGUGAA | 5080 |
| 1955 | ATGTTCAC GGCTAGCTACAACGA AATCGGCC | 2302 | GGCCGAUU G GUGAACAU | 5081 |
| 1959 | GTCCATGT GGCTAGCTACAACGA TCACAATC | 2303 | GAUUGUGA A ACAUGGAC | 5082 |
| 1961 | TAGTCCAT GGCTAGCTACAACGA GTTCACAA | 2304 | UUGUGAAC A AUGGACUA | 5083 |
| 1965 | GACGTAGT GGCTAGCTACAACGA CCATGTTC | 2305 | GAACAUGG A ACUACGUC | 5084 |
| 1968 | CACGACGT GGCTAGCTACAACGA AGTCCATG | 2306 | CAUGGACU A ACGUCGUG | 5085 |
| 1970 | CCCACGAC GGCTAGCTACAACGA GTAGTCCA | 2307 | UGGACUAC G GUCGUGGG | 5086 |
| 1973 | GCTCCCAC GGCTAGCTACAACGA GACGTAGT | 2308 | ACUACGUC G GUGGGAGC | 5087 |
| 1979 | GTTCTGGC GGCTAGCTACAACGA TCCCACGA | 2309 | UCGUGGGA G GCCAGAAC | 5088 |
| 1985 | CGGAACGT GGCTAGCTACAACGA TCTGGCTC | 2310 | GAGCCAGA A ACGUUCCG | 5089 |
| 1987 | TGCGGAAC GGCTAGCTACAACGA GTTCTGGC | 2311 | GCCAGAAC G GUUCCGCA | 5090 |
| 1992 | TTCTCTGC GGCTAGCTACAACGA GGAACGTT | 2312 | AACGUUCC G GCAGAGAA | 5091 |
| 2006 | CGCTCGGC GGCTAGCTACAACGA CCTCTTTT | 2313 | AAAAGAGG G GCCGAGCG | 5092 |
| 2011 | TGAGACGC GGCTAGCTACAACGA TCGGCCCT | 2314 | AGGGCCGA G GCGUCUCA | 5093 |
| 2013 | GGTGAGAC GGCTAGCTACAACGA GCTCGGCC | 2315 | GGCCGAGC G GUCUCACC | 5094 |
| 2018 | CTCGAGGT GGCTAGCTACAACGA GAGACGCT | 2316 | AGCGUCUC A ACCUCGAG | 5095 |
| 2027 | GCCTTCAC GGCTAGCTACAACGA CCTCGAGG | 2317 | CCUCGAGG G GUGAAGGC | 5096 |
| 2033 | AACAGTGC GGCTAGCTACAACGA CTTCACCC | 2318 | GGGUGAAG G GCACUGUU | 5097 |
| 2035 | TGAACAGT GGCTAGCTACAACGA GCCTTCAC | 2319 | GUGAAGGC A ACUGUUCA | 5098 |
| 2038 | CGCTGAAC GGCTAGCTACAACGA AGTGCCTT | 2320 | AAGGCACU G GUUCAGCG | 5099 |
| 2043 | GAGCACGC GGCTAGCTACAACGA TGAACAGT | 2321 | ACUGUUCA G GCGUGCUC | 5100 |
| 2045 | TTGAGCAC GGCTAGCTACAACGA GCTGAACA | 2322 | UGUUCAGC G GUGCUCAA | 5101 |
| 2047 | AGTTGAGC GGCTAGCTACAACGA ACGCTGAA | 2323 | UUCAGCGU G GCUCAACU | 5102 |
| 2052 | CTCGTAGT GGCTAGCTACAACGA TGAGCACG | 2324 | CGUGCUCA A ACUACGAG | 5103 |
| 2055 | CCGCTCGT GGCTAGCTACAACGA AGTTGAGC | 2325 | GCUCAACU A ACGAGCGG | 5104 |
| 2059 | GCGCCCGC GGCTAGCTACAACGA TCGTAGTT | 2326 | AACUACGA G GCGGGCGC | 5105 |
| 2063 | CGCCGCGC GGCTAGCTACAACGA CCGCTCGT | 2327 | ACGAGCGG G GCGCGGCG | 5106 |
| 2065 | GGCGCCGC GGCTAGCTACAACGA GCCCGCTC | 2328 | GAGCGGGC G GCGGCGCC | 5107 |
| 2068 | CGGGGCGC GGCTAGCTACAACGA CGCGCCCG | 2329 | CGGGCGCG G GCGCCCCG | 5108 |
| 2070 | GCCGGGGC GGCTAGCTACAACGA GCCGCGCC | 2330 | GGCGCGGC G GCCCCGGC | 5109 |
| 2076 | CAGGAGGC GGCTAGCTACAACGA CGGGGCGC | 2331 | GCGCCCCG G GCCUCCUG | 5110 |
| 2085 | AGAGGCGC GGCTAGCTACAACGA CCAGGAGG | 2332 | CCUCCUGG G GCGCCUCU | 5111 |
| 2087 | ACAGAGGC GGCTAGCTACAACGA GCCCAGGA | 2333 | UCCUGGGC G GCCUCUGU | 5112 |
| 2093 | CCCAGCAC GGCTAGCTACAACGA AGAGGCGC | 2334 | GCGCCUCU G GUGCUGGG | 5113 |
| 2095 | GGCCCAGC GGCTAGCTACAACGA ACAGAGGC | 2335 | GCCUCUGU G GCUGGGCC | 5114 |
| 2100 | GTCCAGGC GGCTAGCTACAACGA CCAGCACA | 2336 | UGUGCUGG G GCCUGGAC | 5115 |
| 2106 | GATATCGT GGCTAGCTACAACGA CCAGGCCC | 2337 | GGGCCUGG A ACGAUAUC | 5116 |
| 2109 | GTGGATAT GGCTAGCTACAACGA CGTCCAGG | 2338 | CCUGGACG A AUAUCCAC | 5117 |
| 2111 | CTGTGGAT GGCTAGCTACAACGA ATCGTCCA | 2339 | UGGACGAU A AUCCACAG | 5118 |
| 2115 | GGCCCTGT GGCTAGCTACAACGA GGATATCG | 2340 | CGAUAUCC A ACAGGGCC | 5119 |
| 2120 | CGCCAGGC GGCTAGCTACAACGA CCTGTGGA | 2341 | UCCACAGG G GCCUGGCG | 5120 |
| 2125 | AGGTGCGC GGCTAGCTACAACGA CAGGCCCT | 2342 | AGGGCCUG G GCGCACCU | 5121 |
| 2127 | GAAGGTGC GGCTAGCTACAACGA GCCAGGCC | 2343 | GGCCUGGC G GCACCUUC | 5122 |
| 2129 | ACGAAGGT GGCTAGCTACAACGA GCGCCAGG | 2344 | CCUGGCGC A ACCUUCGU | 5123 |
| 2135 | CGCAGCAC GGCTAGCTACAACGA GAAGGTGC | 2345 | GCACCUUC G GUGCUGCG | 5124 |
| 2137 | CACGCAGC GGCTAGCTACAACGA ACGAAGGT | 2346 | ACCUUCGU G GCUGCGUG | 5125 |
| 2140 | GCACACGC GGCTAGCTACAACGA AGCACGAA | 2347 | UUCGUGCU G GCGUGUGC | 5126 |
| 2142 | CCGCACAC GGCTAGCTACAACGA GCAGCACG | 2348 | CGUGCUGC G GUGUGCGG | 5127 |
| 2144 | GCCCGCAC GGCTAGCTACAACGA ACGCAGCA | 2349 | UGCUGCGU G GUGCGGGC | 5128 |
| 2146 | GGGCCCGC GGCTAGCTACAACGA ACACGCAG | 2350 | CUGCGUGU G GCGGGCCC | 5129 |
| 2150 | TCCTGGGC GGCTAGCTACAACGA CCGCACAC | 2351 | GUGUGCGG G GCCCAGGA | 5130 |
| 2157 | CGGCGGGT GGCTAGCTACAACGA CCTGGGCC | 2352 | GGCCCAGG A ACCCGCCG | 5131 |
| 2161 | CAGGCGGC GGCTAGCTACAACGA GGGTCCTG | 2353 | CAGGACCC G GCCGCCUG | 5132 |
| 2164 | GCTCAGGC GGCTAGCTACAACGA GGCGGGTC | 2354 | GACCCGCC G GCCUGAGC | 5133 |
| 2170 | AGTACAGC GGCTAGCTACAACGA TCAGGCGG | 2355 | CCGCCUGA G GCUGUACU | 5134 |
| 2173 | CAAAGTAC GGCTAGCTACAACGA AGCTCAGG | 2356 | CCUGAGCU G GUACUUUG | 5135 |
| 2175 | GACAAAGT GGCTAGCTACAACGA ACAGCTCA | 2357 | UGAGCUGU A ACUUUGUC | 5136 |
| 2180 | ACCTTGAC GGCTAGCTACAACGA AAAGTACA | 2358 | UGUACUUU G GUCAAGGU | 5137 |
| 2186 | ACATCCAC GGCTAGCTACAACGA CTTGACAA | 2359 | UUGUCAAG G GUGGAUGU | 5138 |
| 2190 | CGTCACAT GGCTAGCTACAACGA CCACCTTG | 2360 | CAAGGUGG A AUGUGACG | 5139 |
| 2192 | CCCGTCAC GGCTAGCTACAACGA ATCCACCT | 2361 | AGGUGGAU G GUGACGGG | 5140 |
| 2195 | GCGCCCGT GGCTAGCTACAACGA CACATCCA | 2362 | UGGAUGUG A ACGGGCGC | 5141 |
| 2199 | GTACGCGC GGCTAGCTACAACGA CCGTCACA | 2363 | UGUGACGG G GCGCGUAC | 5142 |
| 2201 | TCGTACGC GGCTAGCTACAACGA GCCCGTCA | 2364 | UGACGGGC G GCGUACGA | 5143 |
| 2203 | TGTCGTAC GGCTAGCTACAACGA GCGCCCGT | 2365 | ACGGGCGC G GUACGACA | 5144 |
| 2205 | GGTGTCGT GGCTAGCTACAACGA ACGCGCCC | 2366 | GGGCGCGU A ACGACACC | 5145 |
| 2208 | GATGGTGT GGCTAGCTACAACGA CGTACGCG | 2367 | CGCGUACG A ACACCAUC | 5146 |
| 2210 | GGGATGGT GGCTAGCTACAACGA GTCGTACG | 2368 | CGUACGAC A ACCAUCCC | 5147 |
| 2213 | TGGGGGAT GGCTAGCTACAACGA GGTGTCGT | 2369 | ACGACACC A AUCCCCCA | 5148 |
| 2223 | GAGCCTGT GGCTAGCTACAACGA CCTGGGGG | 2370 | CCCCCAGG A ACAGGCUC | 5149 |
| 2227 | CCGTGAGC GGCTAGCTACAACGA CTGTCCTG | 2371 | CAGGACAG G GCUCACGG | 5150 |
| 2231 | ACCTCCGT GGCTAGCTACAACGA GAGCCTGT | 2372 | ACAGGCUC A ACGGAGGU | 5151 |
| 2237 | GCGATGAC GGCTAGCTACAACGA CTCCGTGA | 2373 | UCACGGAG G GUCAUCGC | 5152 |
| 2240 | CTGGCGAT GGCTAGCTACAACGA GACCTCCG | 2374 | CGGAGGUC A AUCGCCAG | 5153 |
| 2243 | ATGCTGGC GGCTAGCTACAACGA GATGACCT | 2375 | AGGUCAUC G GCCAGCAU | 5154 |
| 2247 | GATUATUC GGCTAGCTACAACGA TGGCGATG | 2376 | CAUCGCCA G GCAUCAUC | 5155 |
| 2249 | TTGATGAT GGCTAGCTACAACGA GCTGGCGA | 2377 | UCGCCAGC A AUCAUCAA | 5156 |
| 2252 | GGTTTGAT GGCTAGCTACAACGA GATGCTGG | 2378 | CCAGCAUC A AUCAAACC | 5157 |
| 2257 | TCTGGGGT GGCTAGCTACAACGA TTGATGAT | 2379 | AUCAUCAA A ACCCCAGA | 5158 |
| 2265 | GTACGTGT GGCTAGCTACAACGA TCTGGGGT | 2380 | ACCCCAGA A ACACGUAC | 5159 |
| 2267 | CAGTACGT GGCTAGCTACAACGA GTTCTGGG | 2381 | CCCAGAAC A ACGUACUG | 5160 |
| 2269 | CGCAGTAC GGCTAGCTACAACGA GTGTTCTG | 2382 | CAGAACAC G GUACUGCG | 5161 |
| 2271 | CACGCAGT GGCTAGCTACAACGA ACGTGTTC | 2383 | GAACACGU A ACUGCGUG | 5162 |
| 2274 | ACUCACUC GUCTAGCTACAACGA AGTACGTG | 2384 | CACGUACU G GCGUGCGU | 5163 |
| 2276 | CGACGCAC GGCTAGCTACAACGA GCAGTACG | 2385 | CGUACUGC G GUGCGUCG | 5164 |
| 2278 | ACCGACGC GGCTAGCTACAACGA ACGCAGTA | 2386 | UACUGCGU G GCUUCGGU | 5165 |
| 2280 | ATACCUAC GGCTAGCTACAACGA GCACGCAG | 2387 | CUGCGUGC G UUCGGUAU | 5166 |
| 2284 | CGUCATAC GGCTAGCTACAACGA CGACGCAC | 2388 | GUGCGUCG G GUAUGCCG | 5167 |
| 2286 | CACUGCAT GGCTAGCTACAACGA ACCGACGC | 2389 | GCGUCGGU A AUGCCGUG | 5168 |
| 2288 | ACCACGGC GGCTAGCTACAACGA ATACCGAC | 2390 | GUCGGUAU G GCCGUGGU | 5169 |
| 2291 | TGGACCAC GGCTAGCTACAACGA GGCATACC | 2391 | GGUAUGCC G GUGGUCCA | 5170 |
| 2294 | TTCTGGAC GGCTAGCTACAACGA CACGGCAT | 2392 | AUGCCGUG G GUCCAGAA | 5171 |
| 2303 | TGGGCGGC GGCTAGCTACAACGA CTTCTGGA | 2393 | UCCAGAAG G GCCGCCCA | 5172 |
| 2306 | CCATGGGC GGCTAGCTACAACGA GGCCTTCT | 2394 | AGAAGGCC G GCCCAUGG | 5173 |
| 2310 | GTGCCCAT GGCTAGCTACAACGA GGGCGGCC | 2395 | GGCCGCCC A AUGGGCAC | 5174 |
| 2314 | GGACGTGC GGCTAGCTACAACGA CCATGGGC | 2396 | GCCCAUGG G GCACGUCC | 5175 |
| 2316 | GCGGACGT GGCTAGCTACAACGA GCCCATGG | 2397 | CCAUGGGC A ACGUCCGC | 5176 |
| 2318 | TTGCGGAC GGCTAGCTACAACGA GTGCCCAT | 2398 | AUGGGCAC G GUCCGCAA | 5177 |
| 2322 | GGCCTTGC GGCTAGCTACAACGA GGACGTGC | 2399 | GCACGUCC G GCAAGGCC | 5178 |
| 2327 | TTGAAGGC GGCTAGCTACAACGA CTTGCGGA | 2400 | UCCGCAAG G GCCUUCAA | 5179 |
| 2337 | GACGTGGC GGCTAGCTACAACGA TCTTGAAG | 2401 | CUUCAAGA G GCCACGUC | 5180 |
| 2340 | AGAGACGT GGCTAGCTACAACGA GGCTCTTG | 2402 | CAAGAGCC A ACGUCUCU | 5181 |
| 2342 | GTAGAGAC GGCTAGCTACAACGA GTGGCTCT | 2403 | AGAGCCAC G GUCUCUAC | 5182 |
| 2348 | GTCAAGGT GGCTAGCTACAACGA AGAGACGT | 2404 | ACGUCUCU A ACCUUGAC | 5183 |
| 2354 | AGGTCTGT GGCTAGCTACAACGA CAAGGTAG | 2405 | CUACCUUG A ACAGACCU | 5184 |
| 2358 | CTGGAGGT GGCTAGCTACAACGA CTGTCAAG | 2406 | CUUGACAG A ACCUCCAG | 5185 |
| 2365 | TGTACGGC GGCTAGCTACAACGA TGGAGGTC | 2407 | GACCUCCA G GCCGUACA | 5186 |
| 2368 | GCATGTAC GGCTAGCTACAACGA GGCTGGAG | 2408 | CUCCAGCC G GUACAUGC | 5187 |
| 2370 | TCGCATGT GGCTAGCTACAACGA ACGGCTGG | 2409 | CCAGCCGU A ACAUGCGA | 5188 |
| 2372 | TGTCGCAT GGCTAGCTACAACGA GTACGGCT | 2410 | AGCCGUAC A AUGCGACA | 5189 |
| 2374 | ACTGTCGC GGCTAGCTACAACGA ATGTACGG | 2411 | CCGUACAU G GCGACAGU | 5190 |
| 2377 | CGAACTGT GGCTAGCTACAACGA CGCATGTA | 2412 | UACAUGCG A ACAGUUCG | 5191 |
| 2380 | CCACGAAC GGCTAGCTACAACGA TGTCGCAT | 2413 | AUGCGACA G GUUCGUGG | 5192 |
| 2384 | TGAGCCAC GGCTAGCTACAACGA GAACTGTC | 2414 | GACAGUUC G GUGGCUCA | 5193 |
| 2387 | AGGTGAGC GGCTAGCTACAACGA CACGAACT | 2415 | AGUUCGUG G GCUCACCU | 5194 |
| 2391 | CTGCAGGT GGCTAGCTACAACGA GAGCCACG | 2416 | CGUGGCUC A ACCUGCAG | 5195 |
| 2395 | TCTCCTGC GGCTAGCTACAACGA AGGTGAGC | 2417 | GCUCACCU G GCAGGAGA | 5196 |
| 2402 | GGGCTGGT GGCTAGCTACAACGA CTCCTGCA | 2418 | UGCAGGAG A ACCAGCCC | 5197 |
| 2406 | CAGCGGGC GGCTAGCTACAACGA TGGTCTCC | 2419 | GGAGACCA G GCCCGCUG | 5198 |
| 2410 | CCCTCAGC GGCTAGCTACAACGA GGGCTGGT | 2420 | ACCAGCCC G GCUGAGGG | 5199 |
| 2418 | GACGGCAT GGCTAGCTACAACGA CCCTCAGC | 2421 | GCUGAGGG A AUGCCGUC | 5200 |
| 2420 | ACGACGGC GGCTAGCTACAACGA ATCCCTCA | 2422 | UGAGGGAU G GCCGUCGU | 5201 |
| 2423 | ATGACGAC GGCTAGCTACAACGA GGCATCCC | 2423 | GGGAUGCC G GUCGUCAU | 5202 |
| 2426 | TCGATGAC GGCTAGCTACAACGA GACGGCAT | 2424 | AUGCCGUC G GUCAUCGA | 5203 |
| 2429 | TGCTCGAT GGCTAGCTACAACGA GACGACGG | 2425 | CCGUCGUC A AUCGAGCA | 5204 |
| 2434 | AGCTCTGC GGCTAGCTACAACGA TCGATGAC | 2426 | GUCAUCGA G GCAGAGCU | 5205 |
| 2439 | GGAGGAGC GGCTAGCTACAACGA TCTGCTCG | 2427 | CGAGCAGA G GCUCCUCC | 5206 |
| 2451 | GGCCTCAT GGCTAGCTACAACGA TCAGGGAG | 2428 | CUCCCUGA A AUGAGGCC | 5207 |
| 2456 | CTGCTGGC GGCTAGCTACAACGA CTCATTCA | 2429 | UGAAUGAG G GCCAGCAG | 5208 |
| 2460 | GCCACTGC GGCTAGCTACAACGA TGGCCTCA | 2430 | UGAGGCCA G GCAGUGGC | 5209 |
| 2463 | GAGGCCAC GGCTAGCTACAACGA TGCTGGCC | 2431 | GGCCAGCA G GUGGCCUC | 5210 |
| 2466 | GAAGAGGC GGCTAGCTACAACGA CACTGCTG | 2432 | CAGCAGUG G GCCUCUUC | 5211 |
| 2475 | GAAGACGT GGCTAGCTACAACGA CGAAGAGG | 2433 | CCUCUUCG A ACGUCUUC | 5212 |
| 2477 | AGGAAGAC GGCTAGCTACAACGA GTCGAAGA | 2434 | UCUUCGAC G GUCUUCCU | 5213 |
| 2485 | TGAAGCGT GGCTAGCTACAACGA AGGAAGAC | 2435 | GUCUUCCU A ACGCUUCA | 5214 |
| 2487 | CATGAAGC GGCTAGCTACAACGA GTAGGAAG | 2436 | CUUCCUAC G GCUUCAUG | 5215 |
| 2492 | TGGCACAT GGCTAGCTACAACGA GAAGCGTA | 2437 | UACGCUUC A AUGUGCCA | 5216 |
| 2494 | GGTGGCAC GGCTAGCTACAACGA ATGAAGCG | 2438 | CGCUUCAU G GUGCCACC | 5217 |
| 2496 | GTGGTGGC GGCTAGCTACAACGA ACATGAAG | 2439 | CUUCAUGU G GCCACCAC | 5218 |
| 2499 | GGCGTGGT GGCTAGCTACAACGA GGCACATG | 2440 | CAUGUGCC A ACCACGCC | 5219 |
| 2502 | CACGGCGT GGCTAGCTACAACGA GGTGGCAC | 2441 | GUGCCACC A ACGCCGUG | 5220 |
| 2504 | CGCACGGC GGCTAGCTACAACGA GTGGTGGC | 2442 | GCCACCAC G GCCGUGCG | 5221 |
| 2507 | ATGCGCAC GGCTAGCTACAACGA GGCGTGGT | 2443 | ACCACGCC G GUGCGCAU | 5222 |
| 2509 | TGATGCGC GGCTAGCTACAACGA ACGGCGTG | 2444 | CACGCCGU G GCGCAUCA | 5223 |
| 2511 | CCTGATGC GGCTAGCTACAACGA GCACGGCG | 2445 | CGCCGUGC G GCAUCAGG | 5224 |
| 2513 | CCCCTGAT GGCTAGCTACAACGA GCGCACGG | 2446 | CCGUGCGC A AUCAGGGG | 5225 |
| 2520 | GGACTTGC GGCTAGCTACAACGA CCCTGATG | 2447 | CAUCAGGG G GCAAGUCC | 5226 |
| 2524 | CGTAGGAC GGCTAGCTACAACGA TTGCCCCT | 2448 | AGGGGCAA G GUCCUACG | 5227 |
| 2529 | CTGGACGT GGCTAGCTACAACGA AGGACTTG | 2449 | CAAGUCCU A ACCUCCAG | 5228 |
| 2531 | CACTGGAC GGCTAGCTACAACGA GTAGGACT | 2450 | AGUCCUAC G GUCCAGUG | 5229 |
| 2536 | CCTGGCAC GGCTAGCTACAACGA TGGACGTA | 2451 | UACGUCCA G GUGCCAGG | 5230 |
| 2538 | CCCCTGGC GGCTAGCTACAACGA ACTGGACG | 2452 | CGUCCAGU G GCCAGGGG | 5231 |
| 2546 | TGCGGGAT GGCTAGCTACAACGA CCCCTGGC | 2453 | GCCAGGGG A AUCCCGCA | 5232 |
| 2551 | AGCCCTGC GGCTAGCTACAACGA GGGATCCC | 2454 | GGGAUCCC G GCAGGGCU | 5233 |
| 2556 | GATGGAGC GGCTAGCTACAACGA CCTGCGGG | 2455 | CCCGCAGG G GCUCCAUC | 5234 |
| 2561 | GAGAGGAT GGCTAGCTACAACGA GGAGCCCT | 2456 | AGGGCUCC A AUCCUCUC | 5235 |
| 2570 | AGCAGCGT GGCTAGCTACAACGA GGAGAGGA | 2457 | UCCUCUCC A ACGCUGCU | 5236 |
| 2572 | AGAGCAGC GGCTAGCTACAACGA GTGGAGAG | 2458 | CUCUCCAC G GCUGCUCU | 5237 |
| 2575 | TGCAGAGC GGCTAGCTACAACGA AGCGTGGA | 2459 | UCCACGCU G GCUCUGCA | 5238 |
| 2580 | CAGGCTGC GGCTAGCTACAACGA AGAGCAGC | 2460 | GCUGCUCU G GCAGCCUG | 5239 |
| 2583 | GCACAGGC GGCTAGCTACAACGA TGCAGAGC | 2461 | GCUCUGCA G GCCUGUGC | 5240 |
| 2587 | CGTAGCAC GGCTAGCTACAACGA AGGCTGCA | 2462 | UGCAGCCU G GUGCUACG | 5241 |
| 2589 | GCCGTAGC GGCTAGCTACAACGA ACAGGCTC | 2463 | CAGCCUGU G GCUACGGC | 5242 |
| 2592 | GTCGCCGT GGCTAGCTACAACGA AGCACAGG | 2464 | CCUGUGCU A ACGGCGAC | 5243 |
| 2595 | CATGTCGC GGCTAGCTACAACGA CGTAGCAC | 2465 | GUGCUACG G GCGACAUG | 5244 |
| 2598 | CTCCATGT GGCTAGCTACAACGA CGCCGTAG | 2466 | CUACGGCG A ACAUGGAG | 5245 |
| 2600 | TTCTCCAT GGCTAGCTACAACGA GTCGCCGT | 2467 | ACGGCGAC A AUGGAGAA | 5246 |
| 2607 | CAGCTTGT GGCTAGCTACAACGA TCTCCATG | 2468 | CAUGGAGA A ACAAGCUG | 5247 |
| 2611 | CAAACAGC GGCTAGCTACAACGA TTGTTCTC | 2469 | GAGAACAA G GCUGUUUG | 5248 |
| 2614 | CCGCAAAC GGCTAGCTACAACGA AGCTTGTT | 2470 | AACAAGCU G GUUUGCGG | 5249 |
| 2618 | ATCCCCGC GGCTAGCTACAACGA AAACAGCT | 2471 | AGCUGUUU G GCGGGGAU | 5250 |
| 2624 | CGCCGAAT GGCTAGCTACAACGA CCCCGCAA | 2472 | UUGCGGGG A AUUCGGCG | 5251 |
| 2629 | CGTCCCGC GGCTAGCTACAACGA CGAATCCC | 2473 | GGGAUUCG G GCGGGACG | 5252 |
| 2634 | CAGCCCGT GGCTAGCTACAACGA CCCGCCCA | 2474 | UCGGCGGG A ACGGGCUG | 5253 |
| 2638 | GGAGCAGC GGCTAGCTACAACGA CCGTCCCG | 2475 | CGGGACGG G GCUGCUCC | 5254 |
| 2641 | GCAGGAGC GGCTAGCTACAACGA AGCCCGTC | 2476 | GACGGGCU G GCUCCUGC | 5255 |
| 2647 | CCAAACGC GGCTAGCTACAACGA AGGAGCAG | 2477 | CUGCUCCU G GCGUUUGG | 5256 |
| 2649 | CACCAAAC GGCTAGCTACAACGA GCAGGAGC | 2478 | GCUCCUGC G GUUUGGUG | 5257 |
| 2654 | TCATCCAC GGCTAGCTACAACGA CAAACGCA | 2479 | UGCGUUUG G GUGGAUGA | 5258 |
| 2658 | GAAATCAT GGCTAGCTACAACGA CCACCAAA | 2480 | UUUGGUGG A AUGAUUUC | 5259 |
| 2661 | CAAGAAAT GGCTAGCTACAACGA CATCCACC | 2481 | GGUGGAUG A AUUUCUUG | 5260 |
| 2668 | TCACCAAC GGCTAGCTACAACGA AAGAAATC | 2482 | GAUUUCUU G GUUGGUGA | 5261 |
| 2672 | GGTGTCAC GGCTAGCTACAACGA CAACAAGA | 2483 | UCUUGUUG G GUGACACC | 5262 |
| 2675 | TGAGGTGT GGCTAGCTACAACGA CACCAACA | 2484 | UGUUGGUG A ACACCUCA | 5263 |
| 2677 | GGTGAGGT GGCTAGCTACAACGA GTCACCAA | 2485 | UUGGUGAC A ACCUCACC | 5264 |
| 2682 | GGTGAGGT GGCTAGCTACAACGA GAGGTGTC | 2486 | GACACCUC A ACCUCACC | 5265 |
| 2687 | GCGTGGGT GGCTAGCTACAACGA GAGGTGAG | 2487 | CUCACCUC A ACCCACGC | 5266 |
| 2691 | TTTCGCGT GGCTAGCTACAACGA GGGTGAGG | 2488 | CCUCACCC A ACGCGAAA | 5267 |
| 2693 | GTTTTCGC GGCTAGCTACAACGA GTGGGTGA | 2489 | UCACCCAC G GCGAAAAC | 5268 |
| 2699 | AGGAAGGT GGCTAGCTACAACGA TTTCGCGT | 2490 | ACGCGAAA A ACCUUCCU | 5269 |
| 2711 | ACCAGGGT GGCTAGCTACAACGA CCTGAGGA | 2491 | UCCUCAGG A ACCCUGGU | 5270 |
| 2717 | CCTCGGAC GGCTAGCTACAACGA CAGGGTCC | 2492 | GGACCCUG G GUCCGAGG | 5271 |
| 2724 | AGGGACAC GGCTAGCTACAACGA CTCGGACC | 2493 | GGUCCGAG G GUGUCCCU | 5272 |
| 2726 | TCAGGGAC GGCTAGCTACAACGA ACCTCGGA | 2494 | UCCGAGGU G GUCCCUGA | 5273 |
| 2734 | AGCCATAC GGCTAGCTACAACGA TCAGGGAC | 2495 | GUCCCUGA G GUAUGGCU | 5274 |
| 2736 | GCAGCCAT GGCTAGCTACAACGA ACTCAGGG | 2496 | CCCUGAGU A AUGGCUGC | 5275 |
| 2739 | CACGCAGC GGCTAGCTACAACGA CATACTCA | 2497 | UGAGUAUG G GCUGCGUG | 5276 |
| 2742 | CACCACGC GGCTAGCTACAACGA AGCCATAC | 2498 | GUAUGGCU G GCGUGGUG | 5277 |
| 2744 | TTCACCAC GGCTAGCTACAACGA GCAGCCAT | 2499 | AUGGCUGC G GUGGUGAA | 5278 |
| 2747 | AAGTTCAC GGCTAGCTACAACGA CACGCAGC | 2500 | GCUGCGUG G GUGAACUU | 5279 |
| 2751 | CCGCAAGT GGCTAGCTACAACGA TCACCACG | 2501 | CGUGGUGA A ACUUGCGG | 5280 |
| 2755 | TCTTCCGC GGCTAGCTACAACGA AAGTTCAC | 2502 | GUGAACUU G GCGGAAGA | 5281 |
| 2762 | ACCACTGT GGCTAGCTACAACGA CTTCCGCA | 2503 | UGCGGAAG A ACAGUGGU | 5282 |
| 2765 | TTCACCAC GGCTAGCTACAACGA TGTCTTCC | 2504 | GGAAGACA G GUGGUGAA | 5283 |
| 2768 | AAGTTCAC GGCTAGCTACAACGA CACTGTCT | 2505 | AGACAGUG G GUGAACUU | 5284 |
| 2772 | AGGGAAGT GGCTAGCTACAACGA TCACCACT | 2506 | AGUGGUGA A ACUUCCCU | 5285 |
| 2780 | TCTTCTAC GGCTAGCTACAACGA AGGGAAGT | 2507 | ACUUCCCU G GUAGAAGA | 5286 |
| 2787 | GGCCTCGT GGCTAGCTACAACGA CTTCTACA | 2508 | UGUAGAAG A ACGAGGCC | 5287 |
| 2792 | CCCAGGGC GGCTAGCTACAACGA CTCGTCTT | 2509 | AAGACGAG G GCCCUGGG | 5288 |
| 2799 | CGTGCCAC GGCTAGCTACAACGA CCAGGGCC | 2510 | GGCCCUGG G GUGGCACG | 5289 |
| 2802 | AGCCGTGC GGCTAGCTACAACGA CACCCAGG | 2511 | CCUGGGUG G GCACGGCU | 5290 |
| 2804 | AAAGCCGT GGCTAGCTACAACGA GCCACCCA | 2512 | UGGGUGGC A ACGGCUUU | 5291 |
| 2807 | ACAAAAGC GGCTAGCTACAACGA CGTGCCAC | 2513 | GUGGCACG G GCUUUUGU | 5292 |
| 2813 | ATCTGAAC GGCTAGCTACAACGA AAAAGCCG | 2514 | CGGCUUUU G GUUCAGAU | 5293 |
| 2819 | GCCGGCAT GGCTAGCTACAACGA CTGAACAA | 2515 | UUGUUCAG A AUGCCGGC | 5294 |
| 2821 | GGGCCGGC GGCTAGCTACAACGA ATCTGAAC | 2516 | GUUCAGAU G GCCGGCCC | 5295 |
| 2825 | CCGTGGGC GGCTAGCTACAACGA CGGCATCT | 2517 | AGAUGCCG G GCCCACGG | 5296 |
| 2829 | TAGGCCGT GGCTAGCTACAACGA GGGCCGGC | 2518 | GCCGGCCC A ACGGCCUA | 5297 |
| 2832 | GAATAGGC GGCTAGCTACAACGA CGTGGGCC | 2519 | GGCCCACG G GCCUAUUC | 5298 |
| 2836 | AGGGGAAT GGCTAGCTACAACGA AGGCCGTG | 2520 | CACGGCCU A AUUCCCCU | 5299 |
| 2845 | GGCCGCAC GGCTAGCTACAACGA CAGGGGAA | 2521 | UUCCCCUG G GUGCGGCC | 5300 |
| 2847 | CAGGCCGC GGCTAGCTACAACGA ACCAGGGG | 2522 | CCCCUGGU G GCGGCCUG | 5301 |
| 2850 | CAGCAGGC GGCTAGCTACAACGA CGCACCAG | 2523 | CUGGUGCG G GCCUGCUG | 5302 |
| 2854 | CCAGCAGC GGCTAGCTACAACGA AGGCCGCA | 2524 | UGCGGCCU G GCUGCUGG | 5303 |
| 2857 | TATCCAGC GGCTAGCTACAACGA AGCAGGCC | 2525 | GGCCUGCU G GCUGGAUA | 5304 |
| 2862 | CCGGGTAT GGCTAGCTACAACGA CCAGCAGC | 2526 | GCUGCUGG A AUACCCGG | 5305 |
| 2864 | GTCCGGGT GGCTAGCTACAACGA ATCCAGCA | 2527 | UGCUGGAU A ACCCGGAC | 5306 |
| 2870 | TCCAGGGT GGCTAGCTACAACGA CCGGGTAT | 2528 | AUACCCGG A ACCCUGGA | 5307 |
| 2879 | CTCTGCAC GGCTAGCTACAACGA CTCCAGGG | 2529 | CCCUGGAG G GUGCAGAG | 5308 |
| 2881 | CGCTCTGC GGCTAGCTACAACGA ACCTCCAG | 2530 | CUGGAGGU G GCAGAGCG | 5309 |
| 2886 | GTAGTCGC GGCTAGCTACAACGA TCTGCACC | 2531 | GGUGCAGA G GCGACUAC | 5310 |
| 2889 | GGAGTAGT GGCTAGCTACAACGA CGCTCTGC | 2532 | GCAGAGCG A ACUACUCC | 5311 |
| 2892 | GCTGGAGT GGCTAGCTACAACGA AGTCGCTC | 2533 | GAGCGACU A ACUCCAGC | 5312 |
| 2898 | GGCATAGC GGCTAGCTACAACGA TGGAGTAG | 2534 | CUACUCCA G GCUAUGCC | 5313 |
| 2901 | CCGGGCAT GGCTAGCTACAACGA AGCTGGAG | 2535 | CUCCAGCU A AUGCCCGG | 5314 |
| 2903 | GTCCGGGC GGCTAGCTACAACGA ATAGCTGG | 2536 | CCAGCUAU G GCCCGGAC | 5315 |
| 2909 | ATGGAGGT GGCTAGCTACAACGA CCGGGCAT | 2537 | AUGCCCGG A ACCUCCAU | 5316 |
| 2915 | GCTCTGAT GGCTAGCTACAACGA GGAGGTCC | 2538 | GGACCUCC A AUCAGAGC | 5317 |
| 2921 | AGACTGGC GGCTAGCTACAACGA TCTGATGG | 2539 | CCAUCAGA G GCCAGUCU | 5318 |
| 2925 | GGTGAGAC GGCTAGCTACAACGA TGGCTCTG | 2540 | CAGAGCCA G GUCUCACC | 5319 |
| 2930 | TTGAAGGT GGCTAGCTACAACGA GAGACTGG | 2541 | CCAGUCUC A ACCUUCAA | 5320 |
| 2937 | GCCGCGGT GGCTAGCTACAACGA TGAAGGTG | 2542 | CACCUUCA A ACCGCGGC | 5321 |
| 2940 | GAAGCCGC GGCTAGCTACAACGA GGTTGAAG | 2543 | CUUCAACC G GCGGCUUC | 5322 |
| 2943 | CTTGAAGC GGCTAGCTACAACGA CGCGGTTG | 2544 | CAACCGCG G GCUUCAAG | 5323 |
| 2951 | CTCCCAGC GGCTAGCTACAACGA CTTGAAGC | 2545 | GCUUCAAG G GCUGGGAG | 5324 |
| 2961 | ACGCATGT GGCTAGCTACAACGA TCCTCCCA | 2546 | UGGGAGGA A ACAUGCGU | 5325 |
| 2963 | CGACGCAT GGCTAGCTACAACGA GTTCCTCC | 2547 | GGAGGAAC A AUGCGUCG | 5326 |
| 2965 | TGCGACGC GGCTAGCTACAACGA ATGTTCCT | 2548 | AGGAACAU G GCGUCGCA | 5327 |
| 2967 | TTTGCGAC GGCTAGCTACAACGA GCATGTTC | 2549 | GAACAUGC G GUCGCAAA | 5328 |
| 2970 | GAGTTTGC GGCTAGCTACAACGA GACGCATG | 2550 | CAUGCGUC G GCAAACUC | 5329 |
| 2974 | CAAAGAGT GGCTAGCTACAACGA TTGCGACG | 2551 | CGUCGCAA A ACUCUUUG | 5330 |
| 2984 | CGCAAGAC GGCTAGCTACAACGA CCCAAAGA | 2552 | UCUUUGGG G GUCUUGCG | 5331 |
| 2989 | TCAGCCGC GGCTAGCTACAACGA AAGACCCC | 2553 | GGGGUCUU G GCGGCUGA | 5332 |
| 2992 | ACTTCAGC GGCTAGCTACAACGA CGCAAGAC | 2554 | GUCUUGCG G GCUGAAGU | 5333 |
| 2998 | TGTGACAC GGCTAGCTACAACGA TTCAGCCG | 2555 | CGGCUGAA G GUGUCACA | 5334 |
| 3000 | GCTGTGAC GGCTAGCTACAACGA ACTTCAGC | 2556 | GCUGAAGU G GUCACAGC | 5335 |
| 3003 | CAGGCTGT GGCTAGCTACAACGA GACACTTC | 2557 | GAAGUGUC A ACAGCCUG | 5336 |
| 3006 | AAACAGGC GGCTAGCTACAACGA TGTGACAC | 2558 | GUGUCACA G GCCUGUUU | 5337 |
| 3010 | CCAGAAAC GGCTAGCTACAACGA AGGCTGTG | 2559 | CACAGCCU G GUUUCUGG | 5338 |
| 3018 | CTGCAAAT GGCTAGCTACAACGA CCAGAAAC | 2560 | GUUUCUGG A AUUUGCAG | 5339 |
| 3022 | TCACCTGC GGCTAGCTACAACGA AAATCCAG | 2561 | CUGGAUUU G GCAGGUGA | 5340 |
| 3026 | CTGTTCAC GGCTAGCTACAACGA CTGCAAAT | 2562 | AUUUGCAG G GUGAACAG | 5341 |
| 3030 | GAGGCTGT GGCTAGCTACAACGA TCACCTGC | 2563 | GCAGGUGA A ACAGCCUC | 5342 |
| 3033 | CTGGAGGC GGCTAGCTACAACGA TGTTCACC | 2564 | GGUGAACA G GCCUCCAG | 5343 |
| 3041 | CACACCGT GGCTAGCTACAACGA CTGGAGGC | 2565 | GCCUCCAG A ACGGUGUG | 5344 |
| 3044 | GTGCACAC GGCTAGCTACAACGA CGTCTGGA | 2566 | UCCAGACG G GUGUGCAC | 5345 |
| 3046 | TGGTGCAC GGCTAGCTACAACGA ACCGTCTG | 2567 | CAGACGGU G GUGCACCA | 5346 |
| 3048 | GTTGGTGC GGCTAGCTACAACGA ACACCGTC | 2568 | GACGGUGU G GCACCAAC | 5347 |
| 3050 | ATGTTGGT GGCTAGCTACAACGA GCACACCG | 2569 | CGGUGUGC A ACCAACAU | 5348 |
| 3054 | GTAGATGT GGCTAGCTACAACGA TGGTGCAC | 2570 | GUGCACCA A ACAUCUAC | 5349 |
| 3056 | TTGTAGAT GGCTAGCTACAACGA GTTGGTGC | 2571 | GCACCAAC A AUCUACAA | 5350 |
| 3060 | GATCTTGT GGCTAGCTACAACGA AGATGTTG | 2572 | CAACAUCU A ACAAGAUC | 5351 |
| 3065 | AGGAGGAT GGCTAGCTACAACGA CTTGTAGA | 2573 | UCUACAAG A AUCCUCCU | 5352 |
| 3073 | CCTGCAGC GGCTAGCTACAACGA AGGAGGAT | 2574 | AUCCUCCU G GCUGCAGG | 5353 |
| 3076 | ACGCCTGC GGCTAGCTACAACGA AGCAGGAG | 2575 | CUCCUGCU G GCAGGCGU | 5354 |
| 3080 | CTGTACGC GGCTAGCTACAACGA CTGCAGCA | 2576 | UGCUGCAG G GCGUACAG | 5355 |
| 3082 | ACCTGTAC GGCTAGCTACAACGA GCCTGCAG | 2577 | CUGCAGGC G GUACAGGU | 5356 |
| 3084 | AAACCTGT GGCTAGCTACAACGA ACGCCTGC | 2578 | GCAGGCGU A ACAGGUUU | 5357 |
| 3088 | CGTGAAAC GGCTAGCTACAACGA CTGTACGC | 2579 | GCGUACAG G GUUUCACG | 5358 |
| 3093 | ACATGCGT GGCTAGCTACAACGA GAAACCTG | 2580 | CAGGUUUC A ACGCAUGU | 5359 |
| 3095 | ACACATGC GGCTAGCTACAACGA GTGAAACC | 2581 | GGUUUCAC G GCAUGUGU | 5360 |
| 3097 | GCACACAT GGCTAGCTACAACGA GCGTGAAA | 2582 | UUUCACGC A AUGUGUGC | 5361 |
| 3099 | CAGCACAC GGCTAGCTACAACGA ATGCGTGA | 2583 | UCACGCAU G GUGUGCUG | 5362 |
| 3101 | TGCAGCAC GGCTAGCTACAACGA ACATGCGT | 2584 | ACGCAUGU G GUGCUGCA | 5363 |
| 3103 | GCTGCAGC GGCTAGCTACAACGA ACACATGC | 2585 | GCAUGUGU G GCUGCAGC | 5364 |
| 3106 | GGAGCTGC GGCTAGCTACAACGA AGCACACA | 2586 | UGUGUGCU G GCAGCUCC | 5365 |
| 3109 | ATGGGAGC GGCTAGCTACAACGA TGCAGCAC | 2587 | GUGCUGCA G GCUCCCAU | 5366 |
| 3115 | GATGAAAT GGCTAGCTACAACGA GGGAGCTG | 2588 | CAGCUCCC A AUUUCAUC | 5367 |
| 3120 | TTGCTGAT GGCTAGCTACAACGA GAAATGGG | 2589 | CCCAUUUC A AUCAGCAA | 5368 |
| 3124 | AAACTTGC GGCTAGCTACAACGA TGATGAAA | 2590 | UUUCAUCA G GCAAGUUU | 5369 |
| 3128 | TTCCAAAC GGCTAGCTACAACGA TTGCTGAT | 2591 | AUCAGCAA G GUUUGGAA | 5370 |
| 3138 | TGTGGGGT GGCTAGCTACAACGA TCTTCCAA | 2592 | UUGGAAGA A ACCCCACA | 5371 |
| 3143 | AAAAATGT GGCTAGCTACAACGA GGGGTTCT | 2593 | AGAACCCC A ACAUUUUU | 5372 |
| 3145 | GGAAAAAT GGCTAGCTACAACGA GTGGGGTT | 2594 | AACCCCAC A AUUUUUCC | 5373 |
| 3154 | TGACGCGC GGCTAGCTACAACGA AGGAAAAA | 2595 | UUUUUCCU G GCGCGUCA | 5374 |
| 3156 | GATGACGC GGCTAGCTACAACGA GCAGGAAA | 2596 | UUUCCUGC G GCGUCAUC | 5375 |
| 3158 | GAGATGAC GGCTAGCTACAACGA GCGCAGGA | 2597 | UCCUGCGC G GUCAUCUC | 5376 |
| 3161 | TCAGAGAT GGCTAGCTACAACGA GACGCGCA | 2598 | UGCGCGUC A AUCUCUGA | 5377 |
| 3168 | GGCCGTGT GGCTAGCTACAACGA CAGAGATG | 2599 | CAUCUCUG A ACACGGCC | 5378 |
| 3170 | GAGGCCGT GGCTAGCTACAACGA GTCAGAGA | 2600 | UCUCUGAC A ACGGCCUC | 5379 |
| 3173 | AGGGAGGC GGCTAGCTACAACGA CGTGTCAG | 2601 | CUGACACG G GCCUCCCU | 5380 |
| 3183 | GGAGTAGC GGCTAGCTACAACGA AGAGGGAG | 2602 | CUCCCUCU G GCUACUCC | 5381 |
| 3186 | GATGGAGT GGCTAGCTACAACGA AGCAGAGG | 2603 | CCUCUGCU A ACUCCAUC | 5382 |
| 3191 | TTCAGGAT GGCTAGCTACAACGA GGAGTAGC | 2604 | GCUACUCC A AUCCUGAA | 5383 |
| 3200 | TTCTTGGC GGCTAGCTACAACGA TTTCAGGA | 2605 | UCCUGAAA G GCCAAGAA | 5384 |
| 3207 | CCCTGCGT GGCTAGCTACAACGA TCTTGGCT | 2606 | AGCCAAGA A ACGCAGGG | 5385 |
| 3209 | ATCCCTGC GGCTAGCTACAACGA GTTCTTGG | 2607 | CCAAGAAC G GCAGGGAU | 5386 |
| 3215 | AGCGACAT GGCTAGCTACAACGA CCCTGCGT | 2608 | ACGCAGGG A AUGUCGCU | 5387 |
| 3217 | CCAGCGAC GGCTAGCTACAACGA ATCCCTGC | 2609 | GCAGGGAU G GUCGCUGG | 5388 |
| 3220 | CCCCCAGC GGCTAGCTACAACGA GACATCCC | 2610 | GGGAUGUC G GCUGGGGG | 5389 |
| 3227 | CCCTTGGC GGCTAGCTACAACGA CCCCAGCG | 2611 | CGCUGGGG G GCCAAGGG | 5390 |
| 3234 | GGCGGCGC GGCTAGCTACAACGA CCTTGGCC | 2612 | GGCCAAGG G GCGCCGCC | 5391 |
| 3236 | CCGGCGGC GGCTAGCTACAACGA GCCCTTGG | 2613 | CCAAGGGC G GCCGCCGG | 5392 |
| 3239 | GGGCCGGC GGCTAGCTACAACGA GGCGCCCT | 2614 | AGGGCGCC G GCCGGCCC | 5393 |
| 3243 | CAGAGGGC GGCTAGCTACAACGA CGGCGGCG | 2615 | CGCCGCCG G GCCCUCUG | 5394 |
| 3250 | CGGAGGGC GGCTAGCTACAACGA AGAGGGCC | 2616 | GGCCCUCU G GCCCUCCG | 5395 |
| 3260 | TGCACGGC GGCTAGCTACAACGA CTCGGAGG | 2617 | CCUCCGAG G GCCGUGCA | 5396 |
| 3263 | CACTGCAC GGCTAGCTACAACGA GGCCTCGG | 2618 | CCGAGGCC G GUGCAGUG | 5397 |
| 3265 | GCCACTGC GGCTAGCTACAACGA ACGGCCTC | 2619 | GAGGCCGU G GCAGUGGC | 5398 |
| 3268 | ACAGCCAC GGCTAGCTACAACGA TGCACGGC | 2620 | GCCGUGCA G GUGGCUGU | 5399 |
| 3271 | GGCACAGG GGCTAGCTACAACGA CACTGCAC | 2621 | GUGCAGUG G GCUGUGCC | 5400 |
| 3274 | GGTGGCAC GGCTAGCTACAACGA AGCCACTG | 2622 | CAGUGGCU G GUGCCACC | 5401 |
| 3276 | TTGGTGGC GGCTAGCTACAACGA ACAGCCAC | 2623 | GUGGCUGU G GCCACCAA | 5402 |
| 3279 | TGCTTGGT GGCTAGCTACAACGA GGCACAGC | 2624 | GCUGUGCC A ACCAAGCA | 5403 |
| 3284 | AGGAATGC GGCTAGCTACAACGA TTGGTGGC | 2625 | GCCACCAA G GCAUUCCU | 5404 |
| 3286 | GCAGGAAT GGCTAGCTACAACGA GCTTGGTG | 2626 | CACCAAGC A AUUCCUGC | 5405 |
| 3292 | GCTTGAGC GGCTAGCTACAACGA AGGAATGC | 2627 | GCAUUCCU G GCUCAAGC | 5406 |
| 3298 | GAGTCAGC GGCTAGCTACAACGA TTGAGCAG | 2628 | CUGCUCAA G GCUGACUC | 5407 |
| 3302 | TGTCGAGT GGCTAGCTACAACGA CAGCTTGA | 2629 | UCAAGCUG A ACUCGACA | 5408 |
| 3307 | CACGGTGT GGCTAGCTACAACGA CGAGTCAG | 2630 | CUGACUCG A ACACCGUG | 5409 |
| 3309 | GACACGGT GGCTAGCTACAACGA GTCGAGTC | 2631 | GACUCGAC A ACCGUGUC | 5410 |
| 3312 | GGTGACAC GGCTAGCTACAACGA GGTGTCGA | 2632 | UCGACACC G GUGUCACC | 5411 |
| 3314 | TAGGTGAC GGCTAGCTACAACGA ACGGTGTC | 2633 | GACACCGU G GUCACCUA | 5412 |
| 3317 | ACGTAGGT GGCTAGCTACAACGA GACACGGT | 2634 | ACCGUGUC A ACCUACGU | 5413 |
| 3321 | TGGCACGT GGCTAGCTACAACGA AGGTGACA | 2635 | UGUCACCU A ACGUGCCA | 5414 |
| 3323 | AGTGGCAC GGCTAGCTACAACGA GTAGGTGA | 2636 | UCACCUAC G GUGCCACU | 5415 |
| 3325 | GGAGTGGC GGCTAGCTACAACGA ACGTAGGT | 2637 | ACCUACGU G GCCACUCC | 5416 |
| 3328 | CCAGGAGT GGCTAGCTACAACGA GGCACGTA | 2638 | UACGUGCC A ACUCCUGG | 5417 |
| 3337 | TGAGTGAC GGCTAGCTACAACGA CCCAGGAG | 2639 | CUCCUGGG G GUCACUCA | 5418 |
| 3340 | TCCTGAGT GGCTAGCTACAACGA GACCCCAG | 2640 | CUGGGGUC A ACUCAGGA | 5419 |
| 3347 | TGGGCTGT GGCTAGCTACAACGA CCTGAGTG | 2641 | CACUCAGG A ACAGCCCA | 5420 |
| 3350 | GTCTGGGC GGCTAGCTACAACGA TGTCCTGA | 2642 | UCAGGACA G GCCCAGAC | 5421 |
| 3356 | AGCTGCGT GGCTAGCTACAACGA CTGGGCTG | 2643 | CAGCCCAG A ACGCAGCU | 5422 |
| 3358 | TCAGCTGC GGCTAGCTACAACGA GTCTGGGC | 2644 | GCCCAGAC G GCAGCUGA | 5423 |
| 3361 | GACTCAGC GGCTAGCTACAACGA TGCGTCTG | 2645 | CAGACGCA G GCUGAGUC | 5424 |
| 3366 | CTTCCGAC GGCTAGCTACAACGA TCAGCTGC | 2646 | GCAGCUGA G GUCGGAAG | 5425 |
| 3373 | CCGGGAGC GGCTAGCTACAACGA TTCCGACT | 2647 | AGUCGGAA G GCUCCCGG | 5426 |
| 3383 | AGCGTCGT GGCTAGCTACAACGA CCCCGGGA | 2648 | UCCCGGGG A ACGACGCU | 5427 |
| 3386 | GTCAGCGT GGCTAGCTACAACGA CGTCCCCG | 2649 | CGGGGACG A ACGCUGAC | 5428 |
| 3388 | CAGTCAGC GGCTAGCTACAACGA GTCGTCCC | 2650 | GGGACGAC G GCUGACUG | 5429 |
| 3392 | AGGGCAGT GGCTAGCTACAACGA CAGCGTCG | 2651 | CGACGCUG A ACUGCCCU | 5430 |
| 3395 | TCCAGGGC GGCTAGCTACAACGA AGTCAGCG | 2652 | CGCUGACU G GCCCUGGA | 5431 |
| 3404 | GCTGCGGC GGCTAGCTACAACGA CTCCAGGG | 2653 | CCCUGGAG G GCCGCAGC | 5432 |
| 3407 | TTGGCTGC GGCTAGCTACAACGA GGCCTCCA | 2654 | UGGAGGCC G GCAGCCAA | 5433 |
| 3410 | GGGTTGGC GGCTAGCTACAACGA TGCGGCCT | 2655 | AGGCCGCA G GCCAACCC | 5434 |
| 3414 | TGCCGGGT GGCTAGCTACAACGA TGGCTGCG | 2656 | CGCAGCCA A ACCCGGCA | 5435 |
| 3419 | GGCAGTGC GGCTAGCTACAACGA CGGGTTGG | 2657 | CCAACCCG G GCACUGCC | 5436 |
| 3421 | AGGGCAGT GGCTAGCTACAACGA GCCGGGTT | 2658 | AACCCGGC A ACUGCCCU | 5437 |
| 3424 | CTGAGGGC GGCTAGCTACAACGA AGTGCCGG | 2659 | CCGGCACU G GCCCUCAG | 5438 |
| 3432 | CTTGAAGT GGCTAGCTACAACGA CTGAGGGC | 2660 | GCCCUCAG A ACUUCAAG | 5439 |
| 3440 | AGGATGGT GGCTAGCTACAACGA CTTGAAGT | 2661 | ACUUCAAG A ACCAUCCU | 5440 |
| 3443 | TCCAGGAT GGCTAGCTACAACGA GGTCTTGA | 2662 | UCAAGACC A AUCCUGGA | 5441 |
| 3450 | CCATCAGT GGCTAGCTACAACGA CCAGGATG | 2663 | CAUCCUGG A ACUGAUGG | 5442 |
| 3454 | GTGGCCAT GGCTAGCTACAACGA CAGTCCAG | 2664 | CUGGACUG A AUGGCCAC | 5443 |
| 3457 | CGGGTGGC GGCTAGCTACAACGA CATCAGTC | 2665 | GACUGAUG G GCCACCCG | 5444 |
| 3460 | GGGCGGGT GGCTAGCTACAACGA GGCCATCA | 2666 | UGAUGGCC A ACCCGCCC | 5445 |
| 3464 | CTGTGGGC GGCTAGCTACAACGA GGGTGGCC | 2667 | GGCCACCC G GCCCACAG | 5446 |
| 3468 | CTGGCTGT GGCTAGCTACAACGA GGGCGGGT | 2668 | ACCCGCCC A ACAGCCAG | 5447 |
| 3471 | GGCCTGGC GGCTAGCTACAACGA TGTGGGCG | 2669 | CGCCCACA G GCCAGGCC | 5448 |
| 3476 | CTCTCGGC GGCTAGCTACAACGA CTGGCTGT | 2670 | ACAGCCAG G GCCGAGAG | 5449 |
| 3483 | GTGTCTGC GGCTAGCTACAACGA TCTCGGCC | 2671 | GGCCGAGA G GCAGACAC | 5450 |
| 3487 | GCTGGTGT GGCTAGCTACAACGA CTGCTCTC | 2672 | GAGAGCAG A ACACCAGC | 5451 |
| 3489 | CTGCTGGT GGCTAGCTACAACGA GTCTGCTC | 2673 | GAGCAGAC A ACCAGCAG | 5452 |
| 3493 | AGGGCTGC GGCTAGCTACAACGA TGGTGTCT | 2674 | AGACACCA G GCAGCCCU | 5453 |
| 3496 | GACAGGGC GGCTAGCTACAACGA TGCTGGTG | 2675 | CACCAGCA G GCCCUGUC | 5454 |
| 3501 | GGCGTGAC GGCTAGCTACAACGA AGGGCTGC | 2676 | GCAGCCCU G GUCACGCC | 5455 |
| 3504 | CCCGGCGT GGCTAGCTACAACGA GACAGGGC | 2677 | GCCCUGUC A ACGCCGGG | 5456 |
| 3506 | AGCCCGGC GGCTAGCTACAACGA GTGACAGG | 2678 | CCUGUCAC G GCCGGGCU | 5457 |
| 3511 | CGTAGAGC GGCTAGCTACAACGA CCGGCGTG | 2679 | CACGCCGG G GCUCUACG | 5458 |
| 3516 | TGGGACGT GGCTAGCTACAACGA AGAGCCCG | 2680 | CGGGCUCU A ACGUCCCA | 5459 |
| 3518 | CCTGGGAC GGCTAGCTACAACGA GTAGAGCC | 2681 | GGCUCUAC G GUCCCAGG | 5460 |
| 3535 | TGGGCCGC GGCTAGCTACAACGA CCCTCCCT | 2682 | AGGGAGGG G GCGGCCCA | 5461 |
| 3538 | GTGTGGGC GGCTAGCTACAACGA CGCCCCTC | 2683 | GAGGGGCG G GCCCACAC | 5462 |
| 3542 | CTGGGTGT GGCTAGCTACAACGA GGGCCGCC | 2684 | GGCGGCCC A ACACCCAG | 5463 |
| 3544 | GCCTGGGT GGCTAGCTACAACGA GTGGGCCG | 2685 | CGGCCCAC A ACCCAGGC | 5464 |
| 3550 | GTGCGGGC GGCTAGCTACAACGA CTGGGTGT | 2686 | ACACCCAG G GCCCGCAC | 5465 |
| 3554 | AGCGGTGC GGCTAGCTACAACGA GGGCCTGG | 2687 | CCAGGCCC G GCACCGCU | 5466 |
| 3556 | CCAGCGGT GGCTAGCTACAACGA GCGGGCCT | 2688 | AGGCCCGC A ACCGCUGG | 5467 |
| 3559 | CTCCCAGC GGCTAGCTACAACGA GGTGCGGG | 2689 | CCCGCACC G GCUGGGAG | 5468 |
| 3566 | CCTCAGAC GGCTAGCTACAACGA TCCCAGCG | 2690 | CGCUGGGA G GUCUGAGG | 5469 |
| 3573 | ACTCAGGC GGCTAGCTACAACGA CTCAGACT | 2691 | AGUCUGAG G GCCUGAGU | 5470 |
| 3579 | ACACTCAC GGCTAGCTACAACGA TCAGGCCT | 2692 | AGGCCUGA G GUGAGUGU | 5471 |
| 3583 | CCAAACAC GGCTAGCTACAACGA TCACTCAG | 2693 | CUGAGUGA G GUGUUUGG | 5472 |
| 3585 | GGCCAAAC GGCTAGCTACAACGA ACTCACTC | 2694 | GAGUGAGU G GUUUGGCC | 5473 |
| 3590 | GCCTCGGC GGCTAGCTACAACGA CAAACACT | 2695 | AGUGUUUG G GCCGAGGC | 5474 |
| 3596 | ATGCAGGC GGCTAGCTACAACGA CTCGGCCA | 2696 | UGGCCGAG G GCCUGCAU | 5475 |
| 3600 | GGACATGC GGCTAGCTACAACGA AGGCCTCG | 2697 | CGAGGCCU G GCAUGUCC | 5476 |
| 3602 | CCGGACAT GGCTAGCTACAACGA GCAGGCCT | 2698 | AGGCCUGC A AUGUCCGG | 5477 |
| 3604 | AGCCGGAC GGCTAGCTACAACGA ATGCAGGC | 2699 | GCCUGCAU G GUCCGGCU | 5478 |
| 3609 | CCTTCAGC GGCTAGCTACAACGA CGGACATG | 2700 | CAUGUCCG G GCUGAAGG | 5479 |
| 3616 | CACTCAGC GGCTAGCTACAACGA CTTCAGCC | 2701 | GGCUGAAG G GCUGAGUG | 5480 |
| 3621 | CCGGACAC GGCTAGCTACAACGA TCAGCCTT | 2702 | AAGGCUGA G GUGUCCGG | 5481 |
| 3623 | AGCCGGAC GGCTAGCTACAACGA ACTCAGCC | 2703 | GGCUGAGU G GUCCGGCU | 5482 |
| 3628 | GCCTCAGC GGCTAGCTACAACGA CGGACACT | 2704 | AGUGUCCG G GCUGAGGC | 5483 |
| 3634 | GCTCAGGC GGCTAGCTACAACGA CTCAGCCG | 2705 | CGGCUGAG G GCCUGAGC | 5484 |
| 3640 | ACACTCGC GGCTAGCTACAACGA TCAGGCCT | 2706 | AGGCCUGA G GCGAGUGU | 5485 |
| 3644 | CTGGACAC GGCTAGCTACAACGA TCGCTCAG | 2707 | CUGAGCGA G GUGUCCAG | 5486 |
| 3646 | GGCTGGAC GGCTAGCTACAACGA ACTCGCTC | 2708 | GAGCGAGU G GUCCAGCC | 5487 |
| 3651 | CCCTTGGC GGCTAGCTACAACGA TGGACACT | 2709 | AGUGUCCA G GCCAAGGG | 5488 |
| 3658 | CACTCAGC GGCTAGCTACAACGA CCTTGGCT | 2710 | AGCCAAGG G GCUGAGUG | 5489 |
| 3663 | CTGGACAC GGCTAGCTACAACGA TCAGCCCT | 2711 | AGGGCUGA G GUGUCCAG | 5490 |
| 3665 | TGCTGGAC GGCTAGCTACAACGA ACTCAGCC | 2712 | GGCUGAGU G GUCCAGCA | 5491 |
| 3670 | AGGTGTGC GGCTAGCTACAACGA TGGACACT | 2713 | AGUGUCCA G GCACACCU | 5492 |
| 3672 | GCAGGTGT GGCTAGCTACAACGA GCTGGACA | 2714 | UGUCCAGC A ACACCUGC | 5493 |
| 3674 | CGGCAGGT GGCTAGCTACAACGA GTGCTGGA | 2715 | UCCAGCAC A ACCUGCCG | 5494 |
| 3678 | AAGACGGC GGCTAGCTACAACGA AGGTGTGC | 2716 | GCACACCU G GCCGUCUU | 5495 |
| 3681 | GTGAAGAC GGCTAGCTACAACGA GGCAGGTG | 2717 | CACCUGCC G GUCUUCAC | 5496 |
| 3687 | GGGGAAGT GGCTAGCTACAACGA GAAGACGG | 2718 | CCGUCUUC A ACUUCCCC | 5497 |
| 3695 | CAGCCTGT GGCTAGCTACAACGA GGGGAAGT | 2719 | ACUUCCCC A ACAGGCUG | 5498 |
| 3699 | GCGCCAGC GGCTAGCTACAACGA CTGTGGGG | 2720 | CCCCACAG G GCUGGCGC | 5499 |
| 3703 | CCGAGCGC GGCTAGCTACAACGA CAGCCTGT | 2721 | ACAGGCUG G GCGCUCGG | 5500 |
| 3705 | AGCCGAGC GGCTAGCTACAACGA GCCAGCCT | 2722 | AGGCUGGC G GCUCGGCU | 5501 |
| 3710 | GGTGGAGC GGCTAGCTACAACGA CGAGCGCC | 2723 | GGCGCUCG G GCUCCACC | 5502 |
| 3715 | CCTGGGGT GGCTAGCTACAACGA GGAGCCGA | 2724 | UCGGCUCC A ACCCCAGG | 5503 |
| 3723 | AAGCTGGC GGCTAGCTACAACGA CCTGGGGT | 2725 | ACCCCAGG G GCCAGCUU | 5504 |
| 3727 | GGAAAAGC GGCTAGCTACAACGA TGGCCCTG | 2726 | CAGGGCCA G GCUUUUCC | 5505 |
| 3737 | CTCCTGGT GGCTAGCTACAACGA GAGGAAAA | 2727 | UUUUCCUC A ACCAGGAG | 5506 |
| 3744 | AGCCGGGC GGCTAGCTACAACGA TCCTGGTG | 2728 | CACCAGGA G GCCCGGCU | 5507 |
| 3749 | GTGGAAGC GGCTAGCTACAACGA CGGGCTCC | 2729 | GGAGCCCG G GCUUCCAC | 5508 |
| 3755 | TGGGGAGT GGCTAGCTACAACGA GGAAGCCG | 2730 | CGGCUUCC A ACUCCCCA | 5509 |
| 3762 | TCCTATGT GGCTAGCTACAACGA GGGGAGTG | 2731 | CACUCCCC A ACAUAGGA | 5510 |
| 3764 | ATTCCTAT GGCTAGCTACAACGA GTGGGGAG | 2732 | CUCCCCAC A AUAGGAAU | 5511 |
| 3770 | TGGACTAT GGCTAGCTACAACGA TCCTATGT | 2733 | ACAUAGGA A AUAGUCCA | 5512 |
| 3773 | GGATGGAC GGCTAGCTACAACGA TATTCCTA | 2734 | UAGGAAUA G GUCCAUCC | 5513 |
| 3777 | CTGGGGAT GGCTAGCTACAACGA GGACTATT | 2735 | AAUAGUCC A AUCCCCAG | 5514 |
| 3785 | TGGCGAAT GGCTAGCTACAACGA CTGGGGAT | 2736 | AUCCCCAG A AUUCGCCA | 5515 |
| 3789 | ACAATGGC GGCTAGCTACAACGA GAATCTGG | 2737 | CCAGAUUC G GCCAUUGU | 5516 |
| 3792 | TGAACAAT GGCTAGCTACAACGA GGCGAATC | 2738 | GAUUCGCC A AUUGUUCA | 5517 |
| 3795 | GGGTGAAC GGCTAGCTACAACGA AATGGCGA | 2739 | UCGCCAUU G GUUCACCC | 5518 |
| 3799 | CGAGGGGT GGCTAGCTACAACGA GAACAATG | 2740 | CAUUGUUC A ACCCCUCG | 5519 |
| 3806 | GGCAGGGC GGCTAGCTACAACGA GAGGGGTG | 2741 | CACCCCUC G GCCCUGCC | 5520 |
| 3811 | AGGAGGGC GGCTAGCTACAACGA AGGGCGAG | 2742 | CUCGCCCU G GCCCUCCU | 5521 |
| 3821 | TGGAAGGC GGCTAGCTACAACGA AAAGGAGG | 2743 | CCUCCUUU G GCCUUCCA | 5522 |
| 3828 | GTGGGGGT GGCTAGCTACAACGA GGAAGGCA | 2744 | UGCCUUCC A ACCCCCAC | 5523 |
| 3834 | TGGATGGT GGCTAGCTACAACGA GGGGGTGG | 2745 | CCACCCCC A ACCAUCCA | 5524 |
| 3837 | ACCTGGAT GGCTAGCTACAACGA GGTGGGGG | 2746 | CCCCCACC A AUCCAGGU | 5525 |
| 3843 | GTCTCCAC GGCTAGCTACAACGA CTGGATGG | 2747 | CCAUCCAG G GUGGAGAC | 5526 |
| 3849 | CTCAGGGT GGCTAGCTACAACGA CTCCACCT | 2748 | AGGUGGAG A ACCCUGAG | 5527 |
| 3861 | CCCAGGGT GGCTAGCTACAACGA CCTTCTCA | 2749 | UGAGAAGG A ACCCUGGG | 5528 |
| 3870 | CCCAGAGC GGCTAGCTACAACGA TCCCAGGG | 2750 | CCCUGGGA G GCUCUGGG | 5529 |
| 3879 | CTCCAAAT GGCTAGCTACAACGA TCCCAGAG | 2751 | CUCUGGGA A AUUUGGAG | 5530 |
| 3886 | TTGGTCAC GGCTAGCTACAACGA TCCAAATT | 2752 | AAUUUGGA G GUGACCAA | 5531 |
| 3889 | CCTTTGGT GGCTAGCTACAACGA CACTCCAA | 2753 | UUGGAGUG A ACCAAAGG | 5532 |
| 3896 | GGGCACAC GGCTAGCTACAACGA CTTTGGTC | 2754 | GACCAAAG G GUGUGCCC | 5533 |
| 3898 | CAGGGCAC GGCTAGCTACAACGA ACCTTTGG | 2755 | CCAAAGGU G GUGCCCUG | 5534 |
| 3900 | TACAGGGC GGCTAGCTACAACGA ACACCTTT | 2756 | AAAGGUGU G GCCCUGUA | 5535 |
| 3905 | CTGTGTAC GGCTAGCTACAACGA AGGGCACA | 2757 | UGUGCCCU G GUACACAG | 5536 |
| 3907 | GCCTGTGT GGCTAGCTACAACGA ACAGGGCA | 2758 | UGCCCUGU A ACACAGGC | 5537 |
| 3909 | TCGCCTGT GGCTAGCTACAACGA GTACAGGG | 2759 | CCCUGUAC A ACAGGCGA | 5538 |
| 3913 | GTCCTCGC GGCTAGCTACAACGA CTGTGTAC | 2760 | GUACACAG G GCGAGGAC | 5539 |
| 3919 | TGCAGGGT GGCTAGCTACAACGA CCTCGCCT | 2761 | AGGCGAGG A ACCCUGCA | 5540 |
| 3924 | CCAGGTGC GGCTAGCTACAACGA AGGGTCCT | 2762 | AGGACCCU G GCACCUGG | 5541 |
| 3926 | ATCCAGGT GGCTAGCTACAACGA GCAGGGTC | 2763 | GACCCUGC A ACCUGGAU | 5542 |
| 3932 | ACCCCCAT GGCTAGCTACAACGA CCAGGTGC | 2764 | GCACCUGG A AUGGGGGU | 5543 |
| 3938 | ACAGGGAC GGCTAGCTACAACGA CCCCATCC | 2765 | GGAUGGGG G GUCCCUGU | 5544 |
| 3944 | TGACCCAC GGCTAGCTACAACGA AGGGACCC | 2766 | GGGUCCCU G GUGGGUCA | 5545 |
| 3948 | AATTTGAC GGCTAGCTACAACGA CCACAGGG | 2767 | CCCUGUGG G GUCAAAUU | 5546 |
| 3953 | CCCCCAAT GGCTAGCTACAACGA TTGACCCA | 2768 | UGGGUCAA A AUUGGGGG | 5547 |
| 3964 | CACAGCAC GGCTAGCTACAACGA CTCCCCCC | 2769 | GGGGGGAG G GUGCUGUG | 5548 |
| 3966 | CCCACAGC GGCTAGCTACAACGA ACCTCCCC | 2770 | GGGGAGGU G GCUGUGGG | 5549 |
| 3969 | ACTCCCAC GGCTAGCTACAACGA AGCACCTC | 2771 | GAGGUGCU G GUGGGAGU | 5550 |
| 3975 | TATTTTAC GGCTAGCTACAACGA TCCCACAG | 2772 | CUGUGGGA G GUAAAAUA | 5551 |
| 3980 | TTCAGTAT GGCTAGCTACAACGA TTTACTCC | 2773 | GGAGUAAA A AUACUGAA | 5552 |
| 3982 | TATTCAGT GGCTAGCTACAACGA ATTTTACT | 2774 | AGUAAAAU A ACUGAAUA | 5553 |
| 3987 | TCATATAT GGCTAGCTACAACGA TCAGTATT | 2775 | AAUACUGA A AUAUAUGA | 5554 |
| 3989 | ACTCATAT GGCTAGCTACAACGA ATTCAGTA | 2776 | UACUGAAU A AUAUGAGU | 5555 |
| 3991 | AAACTCAT GGCTAGCTACAACGA ATATTCAG | 2777 | CUGAAUAU A AUGAGUUU | 5556 |
| 3995 | TGAAAAAC GGCTAGCTACAACGA TCATATAT | 2778 | AUAUAUGA G GUUUUUCA | 5557 |
| 4003 | TTCAAAAC GGCTAGCTACAACGA TGAAAAAC | 2779 | GUUUUUCA G GUUUUGAA | 5558 |

Seq1 = TERT (Homo sapiens telomerase reverse transcriptase (TERT) mRNA, 4015 bp); Nakamura et al., Science 277 (5328), 955-959 (1997)
Cut Site = R/Y (Purine/Pyrimidine)
Stem Length = 8. Core Sequence = GGCTAGCTACAACGA

[0186] TABLE VII
Anti-TERT HH and G-Cleaver Ribozymes

| | | Seq ID | Length |
|---|---|---|---|
| Alias | Ribozyme Sequence | Number | (nt) |
| HH | | | |
| TERT-1051 | AGGAGUA CUGAUGAGGCCGUUAGGCCGAA AGGAAGU | 5559 | 36 |
| TERT-1053 | UGAGGAG CUGAUGAGGCCGUUAGGCCGAA AGAGGAA | 5560 | 36 |
| TERT-1918 | UGAAGCG CUGAUGAGGCCGUUAGGCCGAA AGUCUGG | 5561 | 36 |
| TERT-2383 | GAGCCAC CUGAUGAGGCCGUUAGGCCGAA AACUGUC | 5562 | 36 |
| TERT-2485 | UGAAGCG CUGAUGAGGCCGUUAGGCCGAA AGGAAGA | 5563 | 36 |
| TERT-2566 | GCGUGGA CUGAUGAGGCCGUUAGGCCGAA AGGAUGG | 5564 | 36 |
| TERT-3181 | AGUAGCA CUGAUGAGGCCGUUAGGCCGAA AGGGAGG | 5565 | 36 |
| TERT-3691 | CUGUGGG CUGAUGAGGCCGUUAGGCCGAA AAGUGAA | 5566 | 36 |
| TERT-3758 | AUGUGGG CUGAUGAGGCCGUUAGGCCGAA AGUGGAA | 5567 | 36 |
| TERT-3794 | GGUGAAC CUGAUGAGGCCGUUAGGCCGAA AUGGCGA | 5568 | 36 |
| G-Cleaver | | | |
| TERT-757 | UUGGG UGAUGGCAUGCACUAUGCGCG AACGGCAGAC | 4332 | 36 |
| TERT-2353 | UCUGU UGAUGGCAUGCACUAUGCGCG AAGGUAGAGA | 4471 | 36 |
| TERT-3795 | GUGAA UGAUGGCAUGCACUAUGCGCG AAUGGCGAAU | 4594 | 36 |

1. A ribonucleic acid molecule of about 21 nucleotides in length comprising nucleotide sequence complementary to RNA sequence of telomerase reverse transcriptase (TERT) gene, wherein said ribonucleic acid molecule comprises at least one 2′-sugar modification.

2. The ribonucleic acid molecule of claim 1, wherein said ribonucleic acid comprises at least one phosphate backbone modification.

3. The ribonucleic acid molecule of claim 1, wherein said ribonucleic acid comprises a cap structure at the 5′-end, or 3′-end, or both the 5′-end, or 3′-end.

4. The ribonucleic acid molecule of claim 1, wherein said ribonucleic acid molecule is single-stranded.

5. The ribonucleic acid molecule of claim 1, wherein said sugar modification is 2′-amino, 2′-C-allyl, 2′-fluoro, 2′-O-methyl, 2′-H, or any combination thereof.

The application's sequence listing, which the Patent Office published only in electronic form, follows.

SEQUENCE LISTING (5586 sequences)

SEQ ID NO: 1 - RNA, 17 nt, Homo sapiens
cgcugcguccugcugcg

SEQ ID NO: 2 - RNA, 17 nt, Homo sapiens
cgcgcgcuccccgcugc

SEQ ID NO: 3 - RNA, 17 nt, Homo sapiens
cgugcgcucccugcugc

SEQ ID NO: 4 - RNA, 17 nt, Homo sapiens
cagccacuaccgcgagg

SEQ ID NO: 5 - RNA, 17 nt, Homo sapiens
ggccacguucgugcggc

SEQ ID NO: 6 - RNA, 17 nt, Homo sapiens
gccacguucgugcggcg

SEQ ID NO: 7 - RNA, 17 nt, Homo sapiens
cggcggcuuuccgcgcg

SEQ ID NO: 8 - RNA, 17 nt, Homo sapiens
ggcggcuuuccgcgcgc

SEQ ID NO: 9 - RNA, 17 nt, Homo sapiens
gcggcuuuccgcgcgcu

SEQ ID NO: 10 - RNA, 17 nt, Homo sapiens
cgcccccuccuuccgcc

SEQ ID NO: 11 - RNA, 17 nt, Homo sapiens
ccccuccuuccgccagg

SEQ ID NO: 12 - RNA, 17 nt, Homo sapiens
cccuccuuccgccaggu

SEQ ID NO: 13 - RNA, 17 nt, Homo sapiens
ccagguguccugccuga

SEQ ID NO: 14 - RNA, 17 nt, Homo sapiens
gcuggccuucggcuucg

SEQ ID NO: 15 - RNA, 17 nt, Homo sapiens
cuggccuucggcuucgc

SEQ ID NO: 16 - RNA, 17 nt, Homo sapiens
cuucggcuucgcgcugc

SEQ ID NO: 17 - RNA, 17 nt, Homo sapiens
uucggcuucgcgcugcu

SEQ ID NO: 18 - RNA, 17 nt, Homo sapiens
cgaggccuucaccacca

SEQ ID NO: 19 - RNA, 17 nt, Homo sapiens
gaggccuucaccaccag

SEQ ID NO: 20 - RNA, 17 nt, Homo sapiens
gcgcagcuaccugccca

SEQ ID NO: 21 - RNA, 17 nt, Homo sapiens
gugcugguucaccugcu

SEQ ID NO: 22 - RNA, 17 nt, Homo sapiens
ugcugguucaccugcug

SEQ ID NO: 23 - RNA, 17 nt, Homo sapiens
ugcgcgcucuuugugcu

SEQ ID NO: 24 - RNA, 17 nt, Homo sapiens
cgcgcucuuugugcugg

SEQ ID NO: 25 - RNA, 17 nt, Homo sapiens
gcgcucuuugugcuggu

SEQ ID NO: 26 - RNA, 17 nt, Homo sapiens
ugguggcucccagcugc

SEQ ID NO: 27 - RNA, 17 nt, Homo sapiens
cugcgccuaccaggugu

SEQ ID NO: 28 - RNA, 17 nt, Homo sapiens
gccgcuguaccagcucg

SEQ ID NO: 29 - RNA, 17 nt, Homo sapiens
uaccagcucggcgcugc

SEQ ID NO: 30 - RNA, 17 nt, Homo sapiens
cugccacucaggcccgg

SEQ ID NO: 31 - RNA, 17 nt, Homo sapiens
cacacgcuaguggaccc

SEQ ID NO: 32 - RNA, 17 nt, Homo sapiens
gaaggcgucugggaugc

SEQ ID NO: 33 - RNA, 17 nt, Homo sapiens
ggaaccauagcgucagg

SEQ ID NO: 34 - RNA, 17 nt, Homo sapiens
cauagcgucagggaggc

SEQ ID NO: 35 - RNA, 17 nt, Homo sapiens
gccggggucccccuggg

SEQ ID NO: 36 - RNA, 17 nt, Homo sapiens
gccgaagucugccguug

SEQ ID NO: 37 - RNA, 17 nt, Homo sapiens
ucugccguugcccaaga

SEQ ID NO: 38 - RNA, 17 nt, Homo sapiens
acgcccguugggcaggg

SEQ ID NO: 39 - RNA, 17 nt, Homo sapiens
gcagggguccugggccc

SEQ ID NO: 40 - RNA, 17 nt, Homo sapiens
accgugguuucugugug

SEQ ID NO: 41 - RNA, 17 nt, Homo sapiens
ccgugguuucugugugg

SEQ ID NO: 42 - RNA, 17 nt, Homo sapiens
cgugguuucuguguggu

SEQ ID NO: 43 - RNA, 17 nt, Homo sapiens
uguggugucaccugcca

SEQ ID NO: 44 - RNA, 17 nt, Homo sapiens
agccaccucuuuggagg

SEQ ID NO: 45 - RNA, 17 nt, Homo sapiens
ccaccucuuuggagggu

SEQ ID NO: 46 - RNA, 17 nt, Homo sapiens
caccucuuuggagggug

SEQ ID NO: 47 - RNA, 17 nt, Homo sapiens
ggugcgcucucuggcac

SEQ ID NO: 48 - RNA, 17 nt, Homo sapiens
ugcgcucucuggcacgc

SEQ ID NO: 49 - RNA, 17 nt, Homo sapiens
gcgccacucccacccau

SEQ ID NO: 50 - RNA, 17 nt, Homo sapiens
ccacccauccgugggcc

SEQ ID NO: 51 - RNA, 17 nt, Homo sapiens
ccccccauccacaucgc

SEQ ID NO: 52 - RNA, 17 nt, Homo sapiens
auccacaucgcggccac

SEQ ID NO: 53 - RNA, 17 nt, Homo sapiens
caccacgucccugggac

SEQ ID NO: 54 - RNA, 17 nt, Homo sapiens
acacgccuugucccccg

SEQ ID NO: 55 - RNA, 17 nt, Homo sapiens
cgccuugucccccggug

SEQ ID NO: 56 - RNA, 17 nt, Homo sapiens
cccgguguacgccgaga

SEQ ID NO: 57 - RNA, 17 nt, Homo sapiens
caagcacuuccucuacu

SEQ ID NO: 58 - RNA, 17 nt, Homo sapiens
aagcacuuccucuacuc

SEQ ID NO: 59 - RNA, 17 nt, Homo sapiens
cacuuccucuacuccuc

SEQ ID NO: 60 - RNA, 17 nt, Homo sapiens
cuuccucuacuccucag

SEQ ID NO: 61 - RNA, 17 nt, Homo sapiens
ccucuacuccucaggcg

SEQ ID NO: 62 - RNA, 17 nt, Homo sapiens
cuacuccucaggcgaca

SEQ ID NO: 63 - RNA, 17 nt, Homo sapiens
gcggcccuccuuccuac

SEQ ID NO: 64 - RNA, 17 nt, Homo sapiens
gcccuccuuccuacuca

SEQ ID NO: 65 - RNA, 17 nt, Homo sapiens
cccuccuuccuacucag

SEQ ID NO: 66 - RNA, 17 nt, Homo sapiens
uccuuccuacucagcuc

SEQ ID NO: 67 - RNA, 17 nt, Homo sapiens
uuccuacucagcucucu

SEQ ID NO: 68 - RNA, 17 nt, Homo sapiens
acucagcucucugaggc

SEQ ID NO: 69 - RNA, 17 nt, Homo sapiens
ucagcucucugaggccc

SEQ ID NO: 70 - RNA, 17 nt, Homo sapiens
cuggcgcucggaggcuc

SEQ ID NO: 71 - RNA, 17 nt, Homo sapiens
cggaggcucguggagac

SEQ ID NO: 72 - RNA, 17 nt, Homo sapiens
gagaccaucuuucuggg

SEQ ID NO: 73 - RNA, 17 nt, Homo sapiens
gaccaucuuucuggguu

SEQ ID NO: 74 - RNA, 17 nt, Homo sapiens
accaucuuucuggguuc

SEQ ID NO: 75 - RNA, 17 nt, Homo sapiens
ccaucuuucuggguucc

SEQ ID NO: 76 - RNA, 17 nt, Homo sapiens
uucuggguuccaggccc

SEQ ID NO: 77 - RNA, 17 nt, Homo sapiens
ucuggguuccaggcccu

SEQ ID NO: 78 - RNA, 17 nt, Homo sapiens
cagggacuccccgcagg

SEQ ID NO: 79 - RNA, 17 nt, Homo sapiens
ccgcagguugccccgcc

SEQ ID NO: 80 - RNA, 17 nt, Homo sapiens
ccagcgcuacuggcaaa

SEQ ID NO: 81 - RNA, 17 nt, Homo sapiens
gccccuguuucuggagc

SEQ ID NO: 82 - RNA, 17 nt, Homo sapiens
ccccuguuucuggagcu

SEQ ID NO: 83 - RNA, 17 nt, Homo sapiens
cccuguuucuggagcug

SEQ ID NO: 84 - RNA, 17 nt, Homo sapiens
gagcugcuugggaacca

SEQ ID NO: 85 - RNA, 17 nt, Homo sapiens
gugccccuacggggugc

SEQ ID NO: 86 - RNA, 17 nt, Homo sapiens
ggggugcuccucaagac

SEQ ID NO: 87 - RNA, 17 nt, Homo sapiens
gugcuccucaagacgca

SEQ ID NO: 88 - RNA, 17 nt, Homo sapiens
gcugcggucaccccagc

SEQ ID NO: 89 - RNA, 17 nt, Homo sapiens
gccggugucugugcccg

SEQ ID NO: 90 - RNA, 17 nt, Homo sapiens
ccagggcucuguggcgg

SEQ ID NO: 91 - RNA, 17 nt, Homo sapiens
acccccgucgccuggug

SEQ ID NO: 92 - RNA, 17 nt, Homo sapiens
cagcugcuccgccagca

SEQ ID NO: 93 - RNA, 17 nt, Homo sapiens
gcagguguacggcuucg

SEQ ID NO: 94 - RNA, 17 nt, Homo sapiens
guacggcuucgugcggg

SEQ ID NO: 95 - RNA, 17 nt, Homo sapiens
uacggcuucgugcgggc

SEQ ID NO: 96 - RNA, 17 nt, Homo sapiens
ccaggccucuggggcuc

SEQ ID NO: 97 - RNA, 17 nt, Homo sapiens
cuggggcuccaggcaca

SEQ ID NO: 98 - RNA, 17 nt, Homo sapiens
acgccgcuuccucagga

SEQ ID NO: 99 - RNA, 17 nt, Homo sapiens
cgccgcuuccucaggaa

SEQ ID NO: 100 - RNA, 17 nt, Homo sapiens
cgcuuccucaggaacac

SEQ ID NO: 101 - RNA, 17 nt, Homo sapiens
caagaaguucaucuccc

SEQ ID NO: 102 - RNA, 17 nt, Homo sapiens
aagaaguucaucucccu

SEQ ID NO: 103 - RNA, 17 nt, Homo sapiens
aaguucaucucccuggg

SEQ ID NO: 104 - RNA, 17 nt, Homo sapiens
guucaucucccugggga

SEQ ID NO: 105 - RNA, 17 nt, Homo sapiens
gccaagcucucgcugca

SEQ ID NO: 106 - RNA, 17 nt, Homo sapiens
caagcucucgcugcagg

SEQ ID NO: 107 - RNA, 17 nt, Homo sapiens
acugcgcuuggcugcgc

SEQ ID NO: 108 - RNA, 17 nt, Homo sapiens
ccagggguuggcugugu

SEQ ID NO: 109 - RNA, 17 nt, Homo sapiens
ggcuguguuccggccgc

SEQ ID NO: 110 - RNA, 17 nt, Homo sapiens
gcuguguuccggccgca

SEQ ID NO: 111 - RNA, 17 nt, Homo sapiens
agcaccgucugcgugag

SEQ ID NO: 112 - RNA, 17 nt, Homo sapiens
gaggagauccuggccaa

SEQ ID NO: 113 - RNA, 17 nt, Homo sapiens
ggccaaguuccugcacu

SEQ ID NO: 114 - RNA, 17 nt, Homo sapiens
gccaaguuccugcacug

SEQ ID NO: 115 - RNA, 17 nt, Homo sapiens
gaguguguacgucgucg

SEQ ID NO: 116 - RNA, 17 nt, Homo sapiens
guguacgucgucgagcu

SEQ ID NO: 117 - RNA, 17 nt, Homo sapiens
uacgucgucgagcugcu

SEQ ID NO: 118 - RNA, 17 nt, Homo sapiens
gagcugcucaggucuuu

SEQ ID NO: 119 - RNA, 17 nt, Homo sapiens
gcucaggucuuucuuuu

SEQ ID NO: 120 - RNA, 17 nt, Homo sapiens
ucaggucuuucuuuuau

SEQ ID NO: 121 - RNA, 17 nt, Homo sapiens
caggucuuucuuuuaug

SEQ ID NO: 122 - RNA, 17 nt, Homo sapiens
aggucuuucuuuuaugu

SEQ ID NO: 123 - RNA, 17 nt, Homo sapiens
gucuuucuuuuauguca

SEQ ID NO: 124 - RNA, 17 nt, Homo sapiens
ucuuucuuuuaugucac

SEQ ID NO: 125 - RNA, 17 nt, Homo sapiens
cuuucuuuuaugucacg

SEQ ID NO: 126 - RNA, 17 nt, Homo sapiens
uuucuuuuaugucacgg

SEQ ID NO: 127 - RNA, 17 nt, Homo sapiens
uuuuaugucacggagac

SEQ ID NO: 128 - RNA, 17 nt, Homo sapiens
gaccacguuucaaaaga

SEQ ID NO: 129 - RNA, 17 nt, Homo sapiens
accacguuucaaaagaa

SEQ ID NO: 130 - RNA, 17 nt, Homo sapiens
ccacguuucaaaagaac

SEQ ID NO: 131 - RNA, 17 nt, Homo sapiens
aacaggcucuuuuucua

SEQ ID NO: 132 - RNA, 17 nt, Homo sapiens
caggcucuuuuucuacc

SEQ ID NO: 133 - RNA, 17 nt, Homo sapiens
aggcucuuuuucuaccg

SEQ ID NO: 134 - RNA, 17 nt, Homo sapiens
ggcucuuuuucuaccgg

SEQ ID NO: 135 - RNA, 17 nt, Homo sapiens
gcucuuuuucuaccgga

SEQ ID NO: 136 - RNA, 17 nt, Homo sapiens
cucuuuuucuaccggaa

SEQ ID NO: 137 - RNA, 17 nt, Homo sapiens
cuuuuucuaccggaaga

SEQ ID NO: 138 - RNA, 17 nt, Homo sapiens
aagagugucuggagcaa

SEQ ID NO: 139 - RNA, 17 nt, Homo sapiens
gagcaaguugcaaagca

SEQ ID NO: 140 - RNA, 17 nt, Homo sapiens
caaagcauuggaaucag

SEQ ID NO: 141 - RNA, 17 nt, Homo sapiens
auuggaaucagacagca

SEQ ID NO: 142 - RNA, 17 nt, Homo sapiens
acagcacuugaagaggg

SEQ ID NO: 143 - RNA, 17 nt, Homo sapiens
ggagcugucggaagcag

SEQ ID NO: 144 - RNA, 17 nt, Homo sapiens
gcagaggucaggcagca

SEQ ID NO: 145 - RNA, 17 nt, Homo sapiens
ggcagcaucgggaagcc

SEQ ID NO: 146 - RNA, 17 nt, Homo sapiens
gcugacguccagacucc

SEQ ID NO: 147 - RNA, 17 nt, Homo sapiens
uccagacuccgcuucau

SEQ ID NO: 148 - RNA, 17 nt, Homo sapiens
acuccgcuucaucccca

SEQ ID NO: 149 - RNA, 17 nt, Homo sapiens
cuccgcuucauccccaa

SEQ ID NO: 150 - RNA, 17 nt, Homo sapiens
cgcuucauccccaagcc

SEQ ID NO: 151 - RNA, 17 nt, Homo sapiens
cggccgauugugaacau

SEQ ID NO: 152 - RNA, 17 nt, Homo sapiens
cauggacuacgucgugg

SEQ ID NO: 153 - RNA, 17 nt, Homo sapiens
gacuacgucgugggagc

SEQ ID NO: 154 - RNA, 17 nt, Homo sapiens
cagaacguuccgcagag

SEQ ID NO: 155 - RNA, 17 nt, Homo sapiens
agaacguuccgcagaga

SEQ ID NO: 156 - RNA, 17 nt, Homo sapiens
ccgagcgucucaccucg

SEQ ID NO: 157 - RNA, 17 nt, Homo sapiens
gagcgucucaccucgag

SEQ ID NO: 158 - RNA, 17 nt, Homo sapiens
ucucaccucgaggguga

SEQ ID NO: 159 - RNA, 17 nt, Homo sapiens
ggcacuguucagcgugc

SEQ ID NO: 160 - RNA, 17 nt, Homo sapiens
gcacuguucagcgugcu

SEQ ID NO: 161 - RNA, 17 nt, Homo sapiens
agcgugcucaacuacga

SEQ ID NO: 162 - RNA, 17 nt, Homo sapiens
gcucaacuacgagcggg

SEQ ID NO: 163 - RNA, 17 nt, Homo sapiens
cccggccuccugggcgc

SEQ ID NO: 164 - RNA, 17 nt, Homo sapiens
gggcgccucugugcugg

SEQ ID NO: 165 - RNA, 17 nt, Homo sapiens
uggacgauauccacagg

SEQ ID NO: 166 - RNA, 17 nt, Homo sapiens
gacgauauccacagggc

SEQ ID NO: 167 - RNA, 17 nt, Homo sapiens
gcgcaccuucgugcugc

SEQ ID NO: 168 - RNA, 17 nt, Homo sapiens
cgcaccuucgugcugcg

SEQ ID NO: 169 - RNA, 17 nt, Homo sapiens
ugagcuguacuuuguca

SEQ ID NO: 170 - RNA, 17 nt, Homo sapiens
gcuguacuuugucaagg

SEQ ID NO: 171 - RNA, 17 nt, Homo sapiens
cuguacuuugucaaggu

SEQ ID NO: 172 - RNA, 17 nt, Homo sapiens
uacuuugucaaggugga

SEQ ID NO: 173 - RNA, 17 nt, Homo sapiens
gggcgcguacgacacca

SEQ ID NO: 174 - RNA, 17 nt, Homo sapiens
gacaccaucccccagga

SEQ ID NO: 175 - RNA, 17 nt, Homo sapiens
gacaggcucacggaggu

SEQ ID NO: 176 - RNA, 17 nt, Homo sapiens
acggaggucaucgccag

SEQ ID NO: 177 - RNA, 17 nt, Homo sapiens
gaggucaucgccagcau

SEQ ID NO: 178 - RNA, 17 nt, Homo sapiens
gccagcaucaucaaacc

SEQ ID NO: 179 - RNA, 17 nt, Homo sapiens
agcaucaucaaacccca

SEQ ID NO: 180 - RNA, 17 nt, Homo sapiens
gaacacguacugcgugc

SEQ ID NO: 181 - RNA, 17 nt, Homo sapiens
gcgugcgucgguaugcc

SEQ ID NO: 182 - RNA, 17 nt, Homo sapiens
gcgucgguaugccgugg

SEQ ID NO: 183 - RNA, 17 nt, Homo sapiens
gccgugguccagaaggc

SEQ ID NO: 184 - RNA, 17 nt, Homo sapiens
gggcacguccgcaaggc

SEQ ID NO: 185 - RNA, 17 nt, Homo sapiens
caaggccuucaagagcc

SEQ ID NO: 186 - RNA, 17 nt, Homo sapiens
aaggccuucaagagcca

SEQ ID NO: 187 - RNA, 17 nt, Homo sapiens
agccacgucucuaccuu

SEQ ID NO: 188 - RNA, 17 nt, Homo sapiens
ccacgucucuaccuuga

SEQ ID NO: 189 - RNA, 17 nt, Homo sapiens
acgucucuaccuugaca

SEQ ID NO: 190 - RNA, 17 nt, Homo sapiens
cucuaccuugacagacc

SEQ ID NO: 191 - RNA, 17 nt, Homo sapiens
acagaccuccagccgua

SEQ ID NO: 192 - RNA, 17 nt, Homo sapiens
ccagccguacaugcgac

SEQ ID NO: 193 - RNA, 17 nt, Homo sapiens
gcgacaguucguggcuc

SEQ ID NO: 194 - RNA, 17 nt, Homo sapiens
cgacaguucguggcuca

SEQ ID NO: 195 - RNA, 17 nt, Homo sapiens
ucguggcucaccugcag

SEQ ID NO: 196 - RNA, 17 nt, Homo sapiens
gaugccgucgucaucga

SEQ ID NO: 197 - RNA, 17 nt, Homo sapiens
gccgucgucaucgagca

SEQ ID NO: 198 - RNA, 17 nt, Homo sapiens
gucgucaucgagcagag

SEQ ID NO: 199 - RNA, 17 nt, Homo sapiens
gcagagcuccucccuga

SEQ ID NO: 200 - RNA, 17 nt, Homo sapiens
gagcuccucccugaaug

SEQ ID NO: 201 - RNA, 17 nt, Homo sapiens
aguggccucuucgacgu

SEQ ID NO: 202 - RNA, 17 nt, Homo sapiens
uggccucuucgacgucu

SEQ ID NO: 203 - RNA, 17 nt, Homo sapiens
ggccucuucgacgucuu

SEQ ID NO: 204 - RNA, 17 nt, Homo sapiens
uucgacgucuuccuacg

SEQ ID NO: 205 - RNA, 17 nt, Homo sapiens
cgacgucuuccuacgcu

SEQ ID NO: 206 - RNA, 17 nt, Homo sapiens
gacgucuuccuacgcuu

SEQ ID NO: 207 - RNA, 17 nt, Homo sapiens
gucuuccuacgcuucau

SEQ ID NO: 208 - RNA, 17 nt, Homo sapiens
ccuacgcuucaugugcc

SEQ ID NO: 209 - RNA, 17 nt, Homo sapiens
cuacgcuucaugugcca

SEQ ID NO: 210 - RNA, 17 nt, Homo sapiens
gugcgcaucaggggcaa

SEQ ID NO: 211 - RNA, 17 nt, Homo sapiens
gggcaaguccuacgucc

SEQ ID NO: 212 - RNA, 17 nt, Homo sapiens
caaguccuacguccagu

SEQ ID NO: 213 - RNA, 17 nt, Homo sapiens
uccuacguccagugcca

SEQ ID NO: 214 - RNA, 17 nt, Homo sapiens
caggggaucccgcaggg

SEQ ID NO: 215 - RNA, 17 nt, Homo sapiens
gcagggcuccauccucu

SEQ ID NO: 216 - RNA, 17 nt, Homo sapiens
ggcuccauccucuccac

SEQ ID NO: 217 - RNA, 17 nt, Homo sapiens
uccauccucuccacgcu

SEQ ID NO: 218 - RNA, 17 nt, Homo sapiens
cauccucuccacgcugc

SEQ ID NO: 219 - RNA, 17 nt, Homo sapiens
acgcugcucugcagccu

SEQ ID NO: 220 - RNA, 17 nt, Homo sapiens
ccugugcuacggcgaca

SEQ ID NO: 221 - RNA, 17 nt, Homo sapiens
caagcuguuugcgggga

SEQ ID NO: 222 - RNA, 17 nt, Homo sapiens
aagcuguuugcggggau

SEQ ID NO: 223 - RNA, 17 nt, Homo sapiens
gcggggauucggcggga

SEQ ID NO: 224 - RNA, 17 nt, Homo sapiens
cggggauucggcgggac

SEQ ID NO: 225 - RNA, 17 nt, Homo sapiens
gggcugcuccugcguuu

SEQ ID NO: 226 - RNA, 17 nt, Homo sapiens
uccugcguuugguggau

SEQ ID NO: 227 - RNA, 17 nt, Homo sapiens
ccugcguuugguggaug

SEQ ID NO: 228 - RNA, 17 nt, Homo sapiens
uggaugauuucuuguug

SEQ ID NO: 229 - RNA, 17 nt, Homo sapiens
ggaugauuucuuguugg

SEQ ID NO: 230 - RNA, 17 nt, Homo sapiens
gaugauuucuuguuggu

SEQ ID NO: 231 - RNA, 17 nt, Homo sapiens
ugauuucuuguugguga

SEQ ID NO: 232 - RNA, 17 nt, Homo sapiens
uuucuuguuggugacac

SEQ ID NO: 233 - RNA, 17 nt, Homo sapiens
ugacaccucaccucacc

SEQ ID NO: 234 - RNA, 17 nt, Homo sapiens
ccucaccucacccacgc

SEQ ID NO: 235 - RNA, 17 nt, Homo sapiens
gaaaaccuuccucagga

SEQ ID NO: 236 - RNA, 17 nt, Homo sapiens
aaaaccuuccucaggac

SEQ ID NO: 237 - RNA, 17 nt, Homo sapiens
accuuccucaggacccu

SEQ ID NO: 238 - RNA, 17 nt, Homo sapiens
acccugguccgaggugu

SEQ ID NO: 239 - RNA, 17 nt, Homo sapiens
cgaggugucccugagua

SEQ ID NO: 240 - RNA, 17 nt, Homo sapiens
cccugaguauggcugcg

SEQ ID NO: 241 - RNA, 17 nt, Homo sapiens
ggugaacuugcggaaga

SEQ ID NO: 242 - RNA, 17 nt, Homo sapiens
ggugaacuucccuguag

SEQ ID NO: 243 - RNA, 17 nt, Homo sapiens
gugaacuucccuguaga

SEQ ID NO: 244 - RNA, 17 nt, Homo sapiens
uucccuguagaagacga

SEQ ID NO: 245 - RNA, 17 nt, Homo sapiens
gcacggcuuuuguucag

SEQ ID NO: 246 - RNA, 17 nt, Homo sapiens
cacggcuuuuguucaga

SEQ ID NO: 247 - RNA, 17 nt, Homo sapiens
acggcuuuuguucagau

SEQ ID NO: 248 - RNA, 17 nt, Homo sapiens
gcuuuuguucagaugcc

SEQ ID NO: 249 - RNA, 17 nt, Homo sapiens
cuuuuguucagaugccg

SEQ ID NO: 250 - RNA, 17 nt, Homo sapiens
cacggccuauuccccug

SEQ ID NO: 251 - RNA, 17 nt, Homo sapiens
cggccuauuccccuggu

SEQ ID NO: 252 - RNA, 17 nt, Homo sapiens
ggccuauuccccuggug

SEQ ID NO: 253 - RNA, 17 nt, Homo sapiens
ugcuggauacccggacc

SEQ ID NO: 254 - RNA, 17 nt, Homo sapiens
gagcgacuacuccagcu

SEQ ID NO: 255 - RNA, 17 nt, Homo sapiens
cgacuacuccagcuaug

SEQ ID NO: 256 - RNA, 17 nt, Homo sapiens
cuccagcuaugcccgga

SEQ ID NO: 257 - RNA, 17 nt, Homo sapiens
ccggaccuccaucagag

SEQ ID NO: 258 - RNA, 17 nt, Homo sapiens
accuccaucagagccag

SEQ ID NO: 259 - RNA, 17 nt, Homo sapiens
gagccagucucaccuuc

SEQ ID NO: 260 - RNA, 17 nt, Homo sapiens
gccagucucaccuucaa

SEQ ID NO: 261 - RNA, 17 nt, Homo sapiens
ucucaccuucaaccgcg

SEQ ID NO: 262 - RNA, 17 nt, Homo sapiens
cucaccuucaaccgcgg

SEQ ID NO: 263 - RNA, 17 nt, Homo sapiens
ccgcggcuucaaggcug

SEQ ID NO: 264 - RNA, 17 nt, Homo sapiens
cgcggcuucaaggcugg

SEQ ID NO: 265 - RNA, 17 nt, Homo sapiens
acaugcgucgcaaacuc

SEQ ID NO: 266 - RNA, 17 nt, Homo sapiens
cgcaaacucuuuggggu

SEQ ID NO: 267 - RNA, 17 nt, Homo sapiens
caaacucuuuggggucu

SEQ ID NO: 268 - RNA, 17 nt, Homo sapiens
aaacucuuuggggucuu

SEQ ID NO: 269 - RNA, 17 nt, Homo sapiens
uuuggggucuugcggcu

SEQ ID NO: 270 - RNA, 17 nt, Homo sapiens
uggggucuugcggcuga

SEQ ID NO: 271 - RNA, 17 nt, Homo sapiens
ugaagugucacagccug

SEQ ID NO: 272 - RNA, 17 nt, Homo sapiens
cagccuguuucuggauu

SEQ ID NO: 273 - RNA, 17 nt, Homo sapiens
agccuguuucuggauuu

SEQ ID NO: 274 - RNA, 17 nt, Homo sapiens
gccuguuucuggauuug

SEQ ID NO: 275 - RNA, 17 nt, Homo sapiens
uucuggauuugcaggug

SEQ ID NO: 276 - RNA, 17 nt, Homo sapiens
ucuggauuugcagguga

SEQ ID NO: 277 - RNA, 17 nt, Homo sapiens
aacagccuccagacggu

SEQ ID NO: 278 - RNA, 17 nt, Homo sapiens
accaacaucuacaagau

SEQ ID NO: 279 - RNA, 17 nt, Homo sapiens
caacaucuacaagaucc

SEQ ID NO: 280 - RNA, 17 nt, Homo sapiens
uacaagauccuccugcu

SEQ ID NO: 281 - RNA, 17 nt, Homo sapiens
aagauccuccugcugca

SEQ ID NO: 282 - RNA, 17 nt, Homo sapiens
gcaggcguacagguuuc

SEQ ID NO: 283 - RNA, 17 nt, Homo sapiens
guacagguuucacgcau

SEQ ID NO: 284 - RNA, 17 nt, Homo sapiens
uacagguuucacgcaug

SEQ ID NO: 285 - RNA, 17 nt, Homo sapiens
acagguuucacgcaugu

SEQ ID NO: 286 - RNA, 17 nt, Homo sapiens
cugcagcucccauuuca

SEQ ID NO: 287 - RNA, 17 nt, Homo sapiens
gcucccauuucaucagc

SEQ ID NO: 288 - RNA, 17 nt, Homo sapiens
cucccauuucaucagca

SEQ ID NO: 289 - RNA, 17 nt, Homo sapiens
ucccauuucaucagcaa

SEQ ID NO: 290 - RNA, 17 nt, Homo sapiens
cauuucaucagcaaguu

SEQ ID NO: 291 - RNA, 17 nt, Homo sapiens
cagcaaguuuggaagaa

SEQ ID NO: 292 - RNA, 17 nt, Homo sapiens
agcaaguuuggaagaac

SEQ ID NO: 293 - RNA, 17 nt, Homo sapiens
ccccacauuuuuccugc

SEQ ID NO: 294 - RNA, 17 nt, Homo sapiens
cccacauuuuuccugcg

SEQ ID NO: 295 - RNA, 17 nt, Homo sapiens
ccacauuuuuccugcgc

SEQ ID NO: 296 - RNA, 17 nt, Homo sapiens
cacauuuuuccugcgcg

SEQ ID NO: 297 - RNA, 17 nt, Homo sapiens
acauuuuuccugcgcgu

SEQ ID NO: 298 - RNA, 17 nt, Homo sapiens
cugcgcgucaucucuga

SEQ ID NO: 299 - RNA, 17 nt, Homo sapiens
cgcgucaucucugacac

SEQ ID NO: 300 - RNA, 17 nt, Homo sapiens
cgucaucucugacacgg

SEQ ID NO: 301 - RNA, 17 nt, Homo sapiens
cacggccucccucugcu

SEQ ID NO: 302 - RNA, 17 nt, Homo sapiens
gccucccucugcuacuc

SEQ ID NO: 303 - RNA, 17 nt, Homo sapiens
ccucugcuacuccaucc

SEQ ID NO: 304 - RNA, 17 nt, Homo sapiens
cugcuacuccauccuga

SEQ ID NO: 305 - RNA, 17 nt, Homo sapiens
uacuccauccugaaagc

SEQ ID NO: 306 - RNA, 17 nt, Homo sapiens
agggaugucgcuggggg

SEQ ID NO: 307 - RNA, 17 nt, Homo sapiens
ccggcccucugcccucc

SEQ ID NO: 308 - RNA, 17 nt, Homo sapiens
ucugcccuccgaggccg

SEQ ID NO: 309 - RNA, 17 nt, Homo sapiens
ccaagcauuccugcuca

SEQ ID NO: 310 - RNA, 17 nt, Homo sapiens
caagcauuccugcucaa

SEQ ID NO: 311 - RNA, 17 nt, Homo sapiens
uuccugcucaagcugac

SEQ ID NO: 312 - RNA, 17 nt, Homo sapiens
agcugacucgacaccgu

SEQ ID NO: 313 - RNA, 17 nt, Homo sapiens
caccgugucaccuacgu

SEQ ID NO: 314 - RNA, 17 nt, Homo sapiens
ugucaccuacgugccac

SEQ ID NO: 315 - RNA, 17 nt, Homo sapiens
gugccacuccugggguc

SEQ ID NO: 316 - RNA, 17 nt, Homo sapiens
ccuggggucacucagga

SEQ ID NO: 317 - RNA, 17 nt, Homo sapiens
gggucacucaggacagc

SEQ ID NO: 318 - RNA, 17 nt, Homo sapiens
agcugagucggaagcuc

SEQ ID NO: 319 - RNA, 17 nt, Homo sapiens
cggaagcucccggggac

SEQ ID NO: 320 - RNA, 17 nt, Homo sapiens
acugcccucagacuuca

SEQ ID NO: 321 - RNA, 17 nt, Homo sapiens
cucagacuucaagacca

SEQ ID NO: 322 - RNA, 17 nt, Homo sapiens
ucagacuucaagaccau

SEQ ID NO: 323 - RNA, 17 nt, Homo sapiens
aagaccauccuggacug

SEQ ID NO: 324 - RNA, 17 nt, Homo sapiens
agcccugucacgccggg

SEQ ID NO: 325 - RNA, 17 nt, Homo sapiens
gccgggcucuacguccc

SEQ ID NO: 326 - RNA, 17 nt, Homo sapiens
cgggcucuacgucccag

SEQ ID NO: 327 - RNA, 17 nt, Homo sapiens
cucuacgucccagggag

SEQ ID NO: 328 - RNA, 17 nt, Homo sapiens
cugggagucugaggccu

SEQ ID NO: 329 - RNA, 17 nt, Homo sapiens
gugaguguuuggccgag

SEQ ID NO: 330 - RNA, 17 nt, Homo sapiens
ugaguguuuggccgagg

SEQ ID NO: 331 - RNA, 17 nt, Homo sapiens
cugcauguccggcugaa

SEQ ID NO: 332 - RNA, 17 nt, Homo sapiens
cugaguguccggcugag

SEQ ID NO: 333 - RNA, 17 nt, Homo sapiens
gcgaguguccagccaag

SEQ ID NO: 334 - RNA, 17 nt, Homo sapiens
cugaguguccagcacac

SEQ ID NO: 335 - RNA, 17 nt, Homo sapiens
ccugccgucuucacuuc

SEQ ID NO: 336 - RNA, 17 nt, Homo sapiens
ugccgucuucacuuccc

SEQ ID NO: 337 - RNA, 17 nt, Homo sapiens
gccgucuucacuucccc

SEQ ID NO: 338 - RNA, 17 nt, Homo sapiens
ucuucacuuccccacag

SEQ ID NO: 339 - RNA, 17 nt, Homo sapiens
cuucacuuccccacagg

SEQ ID NO: 340 - RNA, 17 nt, Homo sapiens
cuggcgcucggcuccac

SEQ ID NO: 341 - RNA, 17 nt, Homo sapiens
gcucggcuccaccccag

SEQ ID NO: 342 - RNA, 17 nt, Homo sapiens
ggccagcuuuuccucac

SEQ ID NO: 343 - RNA, 17 nt, Homo sapiens
gccagcuuuuccucacc

SEQ ID NO: 344 - RNA, 17 nt, Homo sapiens
ccagcuuuuccucacca

SEQ ID NO: 345 - RNA, 17 nt, Homo sapiens
cagcuuuuccucaccag

SEQ ID NO: 346 - RNA, 17 nt, Homo sapiens
cuuuuccucaccaggag

SEQ ID NO: 347 - RNA, 17 nt, Homo sapiens
gcccggcuuccacuccc

SEQ ID NO: 348 - RNA, 17 nt, Homo sapiens
cccggcuuccacucccc

SEQ ID NO: 349 - RNA, 17 nt, Homo sapiens
cuuccacuccccacaua

SEQ ID NO: 350 - RNA, 17 nt, Homo sapiens
ccccacauaggaauagu

SEQ ID NO: 351 - RNA, 17 nt, Homo sapiens
auaggaauaguccaucc

SEQ ID NO: 352 - RNA, 17 nt, Homo sapiens
ggaauaguccaucccca

SEQ ID NO: 353 - RNA, 17 nt, Homo sapiens
uaguccauccccagauu

SEQ ID NO: 354 - RNA, 17 nt, Homo sapiens
ccccagauucgccauug

SEQ ID NO: 355 - RNA, 17 nt, Homo sapiens
cccagauucgccauugu

SEQ ID NO: 356 - RNA, 17 nt, Homo sapiens
uucgccauuguucaccc

SEQ ID NO: 357 - RNA, 17 nt, Homo sapiens
gccauuguucaccccuc

SEQ ID NO: 358 - RNA, 17 nt, Homo sapiens
ccauuguucaccccucg

SEQ ID NO: 359 - RNA, 17 nt, Homo sapiens
ucaccccucgcccugcc

SEQ ID NO: 360 - RNA, 17 nt, Homo sapiens
ccugcccuccuuugccu

SEQ ID NO: 361 - RNA, 17 nt, Homo sapiens
gcccuccuuugccuucc

SEQ ID NO: 362 - RNA, 17 nt, Homo sapiens
cccuccuuugccuucca

SEQ ID NO: 363 - RNA, 17 nt, Homo sapiens
cuuugccuuccaccccc

SEQ ID NO: 364 - RNA, 17 nt, Homo sapiens
uuugccuuccaccccca

SEQ ID NO: 365 - RNA, 17 nt, Homo sapiens
cccaccauccaggugga

SEQ ID NO: 366 - RNA, 17 nt, Homo sapiens
ugggagcucugggaauu

SEQ ID NO: 367 - RNA, 17 nt, Homo sapiens
cugggaauuuggaguga

SEQ ID NO: 368 - RNA, 17 nt, Homo sapiens
ugggaauuuggagugac

SEQ ID NO: 369 - RNA, 17 nt, Homo sapiens
ugcccuguacacaggcg

SEQ ID NO: 370 - RNA, 17 nt, Homo sapiens
augggggucccuguggg

SEQ ID NO: 371 - RNA, 17 nt, Homo sapiens
cugugggucaaauuggg

SEQ ID NO: 372 - RNA, 17 nt, Homo sapiens
ggucaaauuggggggag

SEQ ID NO: 373 - RNA, 17 nt, Homo sapiens
gugggaguaaaauacug

SEQ ID NO: 374 - RNA, 17 nt, Homo sapiens
aguaaaauacugaauau

SEQ ID NO: 375 - RNA, 17 nt, Homo sapiens
uacugaauauaugaguu

SEQ ID NO: 376 - RNA, 17 nt, Homo sapiens
cugaauauaugaguuuu

SEQ ID NO: 377 - RNA, 17 nt, Homo sapiens
auaugaguuuuucaguu

SEQ ID NO: 378 - RNA, 17 nt, Homo sapiens
uaugaguuuuucaguuu

SEQ ID NO: 379 - RNA, 17 nt, Homo sapiens
augaguuuuucaguuuu

SEQ ID NO: 380 - RNA, 17 nt, Homo sapiens
ugaguuuuucaguuuug

SEQ ID NO: 381 - RNA, 17 nt, Homo sapiens
gaguuuuucaguuuuga

SEQ ID NO: 382 - RNA, 17 nt, Homo sapiens
uuuucaguuuugaaaaa

SEQ ID NO: 383 - RNA, 17 nt, Homo sapiens
uuucaguuuugaaaaaa

SEQ ID NO: 384 - RNA, 17 nt, Homo sapiens
uucaguuuugaaaaaaa

SEQ ID NO: 385 - RNA, 17 nt, Homo sapiens
gcugcguccugcugcgc

SEQ ID NO: 386 - RNA, 17 nt, Homo sapiens
cugcguccugcugcgca

SEQ ID NO: 387 - RNA, 17 nt, Homo sapiens
cguccugcugcgcacgu

SEQ ID NO: 388 - RNA, 17 nt, Homo sapiens
ugcugcgcacgugggaa

SEQ ID NO: 389 - RNA, 17 nt, Homo sapiens
ugggaagcccuggcccc

SEQ ID NO: 390 - RNA, 17 nt, Homo sapiens
gggaagcccuggccccg

SEQ ID NO: 391 - RNA, 17 nt, Homo sapiens
ggaagcccuggccccgg

SEQ ID NO: 392 - RNA, 17 nt, Homo sapiens
gcccuggccccggccac

SEQ ID NO: 393 - RNA, 17 nt, Homo sapiens
cccuggccccggccacc

SEQ ID NO: 394 - RNA, 17 nt, Homo sapiens
ccuggccccggccaccc

SEQ ID NO: 395 - RNA, 17 nt, Homo sapiens
gccccggccacccccgc

SEQ ID NO: 396 - RNA, 17 nt, Homo sapiens
ccccggccacccccgcg

SEQ ID NO: 397 - RNA, 17 nt, Homo sapiens
ccggccacccccgcgau

SEQ ID NO: 398 - RNA, 17 nt, Homo sapiens
cggccacccccgcgaug

SEQ ID NO: 399 - RNA, 17 nt, Homo sapiens
ggccacccccgcgaugc

SEQ ID NO: 400 - RNA, 17 nt, Homo sapiens
gccacccccgcgaugcc

SEQ ID NO: 401 - RNA, 17 nt, Homo sapiens
cgcgaugccgcgcgcuc

SEQ ID NO: 402 - RNA, 17 nt, Homo sapiens
ccgcgcgcuccccgcug

SEQ ID NO: 403 - RNA, 17 nt, Homo sapiens
gcgcgcuccccgcugcc

SEQ ID NO: 404 - RNA, 17 nt, Homo sapiens
cgcgcuccccgcugccg

SEQ ID NO: 405 - RNA, 17 nt, Homo sapiens
gcgcuccccgcugccga

SEQ ID NO: 406 - RNA, 17 nt, Homo sapiens
cuccccgcugccgagcc

SEQ ID NO: 407 - RNA, 17 nt, Homo sapiens
cccgcugccgagccgug

SEQ ID NO: 408 - RNA, 17 nt, Homo sapiens
ugccgagccgugcgcuc

SEQ ID NO: 409 - RNA, 17 nt, Homo sapiens
ccgugcgcucccugcug

SEQ ID NO: 410 - RNA, 17 nt, Homo sapiens
gugcgcucccugcugcg

SEQ ID NO: 411 - RNA, 17 nt, Homo sapiens
ugcgcucccugcugcgc

SEQ ID NO: 412 - RNA, 17 nt, Homo sapiens
gcgcucccugcugcgca

SEQ ID NO: 413 - RNA, 17 nt, Homo sapiens
cucccugcugcgcagcc

SEQ ID NO: 414 - RNA, 17 nt, Homo sapiens
ugcugcgcagccacuac

SEQ ID NO: 415 - RNA, 17 nt, Homo sapiens
ugcgcagccacuaccgc

SEQ ID NO: 416 - RNA, 17 nt, Homo sapiens
gcgcagccacuaccgcg

SEQ ID NO: 417 - RNA, 17 nt, Homo sapiens
gcagccacuaccgcgag

SEQ ID NO: 418 - RNA, 17 nt, Homo sapiens
gccacuaccgcgaggug

SEQ ID NO: 419 - RNA, 17 nt, Homo sapiens
cgaggugcugccgcugg

SEQ ID NO: 420 - RNA, 17 nt, Homo sapiens
ggugcugccgcuggcca

SEQ ID NO: 421 - RNA, 17 nt, Homo sapiens
gcugccgcuggccacgu

SEQ ID NO: 422 - RNA, 17 nt, Homo sapiens
ccgcuggccacguucgu

SEQ ID NO: 423 - RNA, 17 nt, Homo sapiens
cgcuggccacguucgug

SEQ ID NO: 424 - RNA, 17 nt, Homo sapiens
ugcggcgccuggggccc

SEQ ID NO: 425 - RNA, 17 nt, Homo sapiens
gcggcgccuggggcccc

SEQ ID NO: 426 - RNA, 17 nt, Homo sapiens
ccuggggccccagggcu

SEQ ID NO: 427 - RNA, 17 nt, Homo sapiens
cuggggccccagggcug

SEQ ID NO: 428 - RNA, 17 nt, Homo sapiens
uggggccccagggcugg

SEQ ID NO: 429 - RNA, 17 nt, Homo sapiens
ggggccccagggcuggc

SEQ ID NO: 430 - RNA, 17 nt, Homo sapiens
cccagggcuggcggcug

SEQ ID NO: 431 - RNA, 17 nt, Homo sapiens
cuggcggcuggugcagc

SEQ ID NO: 432 - RNA, 17 nt, Homo sapiens
gcuggugcagcgcgggg

SEQ ID NO: 433 - RNA, 17 nt, Homo sapiens
gcggggacccggcggcu

SEQ ID NO: 434 - RNA, 17 nt, Homo sapiens
cggggacccggcggcuu

SEQ ID NO: 435 - RNA, 17 nt, Homo sapiens
ccggcggcuuuccgcgc

SEQ ID NO: 436 - RNA, 17 nt, Homo sapiens
cggcuuuccgcgcgcug

SEQ ID NO: 437 - RNA, 17 nt, Homo sapiens
ccgcgcgcugguggccc

SEQ ID NO: 438 - RNA, 17 nt, Homo sapiens
cugguggcccagugccu

SEQ ID NO: 439 - RNA, 17 nt, Homo sapiens
ugguggcccagugccug

SEQ ID NO: 440 - RNA, 17 nt, Homo sapiens
gguggcccagugccugg

SEQ ID NO: 441 - RNA, 17 nt, Homo sapiens
cccagugccuggugugc

SEQ ID NO: 442 - RNA, 17 nt, Homo sapiens
ccagugccuggugugcg

SEQ ID NO: 443 - RNA, 17 nt, Homo sapiens
gugcgugcccugggacg

SEQ ID NO: 444 - RNA, 17 nt, Homo sapiens
ugcgugcccugggacgc

SEQ ID NO: 445 - RNA, 17 nt, Homo sapiens
gcgugcccugggacgca

SEQ ID NO: 446 - RNA, 17 nt, Homo sapiens
ugggacgcacggccgcc

SEQ ID NO: 447 - RNA, 17 nt, Homo sapiens
cgcacggccgccccccg

SEQ ID NO: 448 - RNA, 17 nt, Homo sapiens
acggccgccccccgccg

SEQ ID NO: 449 - RNA, 17 nt, Homo sapiens
cggccgccccccgccgc

SEQ ID NO: 450 - RNA, 17 nt, Homo sapiens
ggccgccccccgccgcc

SEQ ID NO: 451 - RNA, 17 nt, Homo sapiens
gccgccccccgccgccc

SEQ ID NO: 452 - RNA, 17 nt, Homo sapiens
ccgccccccgccgcccc

SEQ ID NO: 453 - RNA, 17 nt, Homo sapiens
ccccccgccgcccccuc

SEQ ID NO: 454 - RNA, 17 nt, Homo sapiens
cccgccgcccccuccuu

SEQ ID NO: 455 - RNA, 17 nt, Homo sapiens
ccgccgcccccuccuuc

SEQ ID NO: 456 - RNA, 17 nt, Homo sapiens
cgccgcccccuccuucc

SEQ ID NO: 457 - RNA, 17 nt, Homo sapiens
gccgcccccuccuuccg

SEQ ID NO: 458 - RNA, 17 nt, Homo sapiens
ccgcccccuccuuccgc

SEQ ID NO: 459 - RNA, 17 nt, Homo sapiens
gcccccuccuuccgcca

SEQ ID NO: 460 - RNA, 17 nt, Homo sapiens
cccccuccuuccgccag

SEQ ID NO: 461 - RNA, 17 nt, Homo sapiens
ccuccuuccgccaggug

SEQ ID NO: 462 - RNA, 17 nt, Homo sapiens
ccuuccgccaggugucc

SEQ ID NO: 463 - RNA, 17 nt, Homo sapiens
cuuccgccagguguccu

SEQ ID NO: 464 - RNA, 17 nt, Homo sapiens
cagguguccugccugaa

SEQ ID NO: 465 - RNA, 17 nt, Homo sapiens
agguguccugccugaag

SEQ ID NO: 466 - RNA, 17 nt, Homo sapiens
uguccugccugaaggag

SEQ ID NO: 467 - RNA, 17 nt, Homo sapiens
guccugccugaaggagc

SEQ ID NO: 468 - RNA, 17 nt, Homo sapiens
gaaggagcugguggccc

SEQ ID NO: 469 - RNA, 17 nt, Homo sapiens
cugguggcccgagugcu

SEQ ID NO: 470 - RNA, 17 nt, Homo sapiens
ugguggcccgagugcug

SEQ ID NO: 471 - RNA, 17 nt, Homo sapiens
ccgagugcugcagaggc

SEQ ID NO: 472 - RNA, 17 nt, Homo sapiens
agugcugcagaggcugu

SEQ ID NO: 473 - RNA, 17 nt, Homo sapiens
gcagaggcugugcgagc

SEQ ID NO: 474 - RNA, 17 nt, Homo sapiens
gaacgugcuggccuucg

SEQ ID NO: 475 - RNA, 17 nt, Homo sapiens
gugcuggccuucggcuu

SEQ ID NO: 476 - RNA, 17 nt, Homo sapiens
ugcuggccuucggcuuc

SEQ ID NO: 477 - RNA, 17 nt, Homo sapiens
ccuucggcuucgcgcug

SEQ ID NO: 478 - RNA, 17 nt, Homo sapiens
cuucgcgcugcuggacg

SEQ ID NO: 479 - RNA, 17 nt, Homo sapiens
cgcgcugcuggacgggg

SEQ ID NO: 480 - RNA, 17 nt, Homo sapiens
gacggggcccgcggggg

SEQ ID NO: 481 - RNA, 17 nt, Homo sapiens
acggggcccgcgggggc

SEQ ID NO: 482 - RNA, 17 nt, Homo sapiens
gcgggggcccccccgag

SEQ ID NO: 483 - RNA, 17 nt, Homo sapiens
cgggggcccccccgagg

SEQ ID NO: 484 - RNA, 17 nt, Homo sapiens
gggggcccccccgaggc

SEQ ID NO: 485 - RNA, 17 nt, Homo sapiens
ggggcccccccgaggcc

SEQ ID NO: 486 - RNA, 17 nt, Homo sapiens
gggcccccccgaggccu

SEQ ID NO: 487 - RNA, 17 nt, Homo sapiens
ggcccccccgaggccuu

SEQ ID NO: 488 - RNA, 17 nt, Homo sapiens
cccgaggccuucaccac

SEQ ID NO: 489 - RNA, 17 nt, Homo sapiens
ccgaggccuucaccacc

SEQ ID NO: 490 - RNA, 17 nt, Homo sapiens
aggccuucaccaccagc

SEQ ID NO: 491 - RNA, 17 nt, Homo sapiens
gccuucaccaccagcgu

SEQ ID NO: 492 - RNA, 17 nt, Homo sapiens
ccuucaccaccagcgug

SEQ ID NO: 493 - RNA, 17 nt, Homo sapiens
uucaccaccagcgugcg

SEQ ID NO: 494 - RNA, 17 nt, Homo sapiens
ucaccaccagcgugcgc

SEQ ID NO: 495 - RNA, 17 nt, Homo sapiens
gcgugcgcagcuaccug

SEQ ID NO: 496 - RNA, 17 nt, Homo sapiens
ugcgcagcuaccugccc

SEQ ID NO: 497 - RNA, 17 nt, Homo sapiens
gcagcuaccugcccaac

SEQ ID NO: 498 - RNA, 17 nt, Homo sapiens
cagcuaccugcccaaca

SEQ ID NO: 499 - RNA, 17 nt, Homo sapiens
cuaccugcccaacacgg

SEQ ID NO: 500 - RNA, 17 nt, Homo sapiens
uaccugcccaacacggu

SEQ ID NO: 501 - RNA, 17 nt, Homo sapiens
accugcccaacacggug

SEQ ID NO: 502 - RNA, 17 nt, Homo sapiens
ugcccaacacggugacc

SEQ ID NO: 503 - RNA, 17 nt, Homo sapiens
acggugaccgacgcacu

SEQ ID NO: 504 - RNA, 17 nt, Homo sapiens
accgacgcacugcgggg

SEQ ID NO: 505 - RNA, 17 nt, Homo sapiens
cgacgcacugcggggga

SEQ ID NO: 506 - RNA, 17 nt, Homo sapiens
gugggggcugcugcugc

SEQ ID NO: 507 - RNA, 17 nt, Homo sapiens
ggggcugcugcugcgcc

SEQ ID NO: 508 - RNA, 17 nt, Homo sapiens
gcugcugcugcgccgcg

SEQ ID NO: 509 - RNA, 17 nt, Homo sapiens
ugcugcgccgcgugggc

SEQ ID NO: 510 - RNA, 17 nt, Homo sapiens
cgacgugcugguucacc

SEQ ID NO: 511 - RNA, 17 nt, Homo sapiens
gcugguucaccugcugg

SEQ ID NO: 512 - RNA, 17 nt, Homo sapiens
ugguucaccugcuggca

SEQ ID NO: 513 - RNA, 17 nt, Homo sapiens
gguucaccugcuggcac

SEQ ID NO: 514 - RNA, 17 nt, Homo sapiens
ucaccugcuggcacgcu

SEQ ID NO: 515 - RNA, 17 nt, Homo sapiens
cugcuggcacgcugcgc

SEQ ID NO: 516 - RNA, 17 nt, Homo sapiens
uggcacgcugcgcgcuc

SEQ ID NO: 517 - RNA, 17 nt, Homo sapiens
cugcgcgcucuuugugc

SEQ ID NO: 518 - RNA, 17 nt, Homo sapiens
gcgcgcucuuugugcug

SEQ ID NO: 519 - RNA, 17 nt, Homo sapiens
cuuugugcugguggcuc

SEQ ID NO: 520 - RNA, 17 nt, Homo sapiens
cugguggcucccagcug

SEQ ID NO: 521 - RNA, 17 nt, Homo sapiens
gguggcucccagcugcg

SEQ ID NO: 522 - RNA, 17 nt, Homo sapiens
guggcucccagcugcgc

SEQ ID NO: 523 - RNA, 17 nt, Homo sapiens
uggcucccagcugcgcc

SEQ ID NO: 524 - RNA, 17 nt, Homo sapiens
cucccagcugcgccuac

SEQ ID NO: 525 - RNA, 17 nt, Homo sapiens
agcugcgccuaccaggu

SEQ ID NO: 526 - RNA, 17 nt, Homo sapiens
gcugcgccuaccaggug

SEQ ID NO: 527 - RNA, 17 nt, Homo sapiens
gcgccuaccaggugugc

SEQ ID NO: 528 - RNA, 17 nt, Homo sapiens
cgccuaccaggugugcg

SEQ ID NO: 529 - RNA, 17 nt, Homo sapiens
gugcgggccgccgcugu

SEQ ID NO: 530 - RNA, 17 nt, Homo sapiens
cgggccgccgcuguacc

SEQ ID NO: 531 - RNA, 17 nt, Homo sapiens
gccgccgcuguaccagc

SEQ ID NO: 532 - RNA, 17 nt, Homo sapiens
cgcuguaccagcucggc

SEQ ID NO: 533 - RNA, 17 nt, Homo sapiens
gcuguaccagcucggcg

SEQ ID NO: 534 - RNA, 17 nt, Homo sapiens
guaccagcucggcgcug

SEQ ID NO: 535 - RNA, 17 nt, Homo sapiens
cucggcgcugccacuca

SEQ ID NO: 536 - RNA, 17 nt, Homo sapiens
ggcgcugccacucaggc

SEQ ID NO: 537 - RNA, 17 nt, Homo sapiens
gcgcugccacucaggcc

SEQ ID NO: 538 - RNA, 17 nt, Homo sapiens
gcugccacucaggcccg

SEQ ID NO: 539 - RNA, 17 nt, Homo sapiens
ugccacucaggcccggc

SEQ ID NO: 540 - RNA, 17 nt, Homo sapiens
acucaggcccggccccc

SEQ ID NO: 541 - RNA, 17 nt, Homo sapiens
cucaggcccggcccccg

SEQ ID NO: 542 - RNA, 17 nt, Homo sapiens
ggcccggcccccgccac

SEQ ID NO: 543 - RNA, 17 nt, Homo sapiens
gcccggcccccgccaca

SEQ ID NO: 544 - RNA, 17 nt, Homo sapiens
cccggcccccgccacac

SEQ ID NO: 545 - RNA, 17 nt, Homo sapiens
ccggcccccgccacacg

SEQ ID NO: 546 - RNA, 17 nt, Homo sapiens
gcccccgccacacgcua

SEQ ID NO: 547 - RNA, 17 nt, Homo sapiens
cccccgccacacgcuag

SEQ ID NO: 548 - RNA, 17 nt, Homo sapiens
cccgccacacgcuagug

SEQ ID NO: 549 - RNA, 17 nt, Homo sapiens
ccacacgcuaguggacc

SEQ ID NO: 550 - RNA, 17 nt, Homo sapiens
uaguggaccccgaaggc

SEQ ID NO: 551 - RNA, 17 nt, Homo sapiens
aguggaccccgaaggcg

SEQ ID NO: 552 - RNA, 17 nt, Homo sapiens
guggaccccgaaggcgu

SEQ ID NO: 553 - RNA, 17 nt, Homo sapiens
aaggcgucugggaugcg

SEQ ID NO: 554 - RNA, 17 nt, Homo sapiens
gaacgggccuggaacca

SEQ ID NO: 555 - RNA, 17 nt, Homo sapiens
aacgggccuggaaccau

SEQ ID NO: 556 - RNA, 17 nt, Homo sapiens
ccuggaaccauagcguc

SEQ ID NO: 557 - RNA, 17 nt, Homo sapiens
cuggaaccauagcguca

SEQ ID NO: 558 - RNA, 17 nt, Homo sapiens
auagcgucagggaggcc

SEQ ID NO: 559 - RNA, 17 nt, Homo sapiens
agggaggccgggguccc

SEQ ID NO: 560 - RNA, 17 nt, Homo sapiens
ccggggucccccugggc

SEQ ID NO: 561 - RNA, 17 nt, Homo sapiens
cggggucccccugggcc

SEQ ID NO: 562 - RNA, 17 nt, Homo sapiens
ggggucccccugggccu

SEQ ID NO: 563 - RNA, 17 nt, Homo sapiens
gggucccccugggccug

SEQ ID NO: 564 - RNA, 17 nt, Homo sapiens
ggucccccugggccugc

SEQ ID NO: 565 - RNA, 17 nt, Homo sapiens
cccugggccugccagcc

SEQ ID NO: 566 - RNA, 17 nt, Homo sapiens
ccugggccugccagccc

SEQ ID NO: 567 - RNA, 17 nt, Homo sapiens
gggccugccagccccgg

SEQ ID NO: 568 - RNA, 17 nt, Homo sapiens
ggccugccagccccggg

SEQ ID NO: 569 - RNA, 17 nt, Homo sapiens
cugccagccccgggugc

SEQ ID NO: 570 - RNA, 17 nt, Homo sapiens
ugccagccccgggugcg

SEQ ID NO: 571 - RNA, 17 nt, Homo sapiens
gccagccccgggugcga

SEQ ID NO: 572 - RNA, 17 nt, Homo sapiens
gcgggggcagugccagc

SEQ ID NO: 573 - RNA, 17 nt, Homo sapiens
ggcagugccagccgaag

SEQ ID NO: 574 - RNA, 17 nt, Homo sapiens
gcagugccagccgaagu

SEQ ID NO: 575 - RNA, 17 nt, Homo sapiens
gugccagccgaagucug

SEQ ID NO: 576 - RNA, 17 nt, Homo sapiens
ccgaagucugccguugc

SEQ ID NO: 577 - RNA, 17 nt, Homo sapiens
aagucugccguugccca

SEQ ID NO: 578 - RNA, 17 nt, Homo sapiens
gccguugcccaagaggc

SEQ ID NO: 579 - RNA, 17 nt, Homo sapiens
ccguugcccaagaggcc

SEQ ID NO: 580 - RNA, 17 nt, Homo sapiens
cguugcccaagaggccc

SEQ ID NO: 581 - RNA, 17 nt, Homo sapiens
caagaggcccaggcgug

SEQ ID NO: 582 - RNA, 17 nt, Homo sapiens
aagaggcccaggcgugg

SEQ ID NO: 583 - RNA, 17 nt, Homo sapiens
agaggcccaggcguggc

SEQ ID NO: 584 - RNA, 17 nt, Homo sapiens
cguggcgcugccccuga

SEQ ID NO: 585 - RNA, 17 nt, Homo sapiens
ggcgcugccccugagcc

SEQ ID NO: 586 - RNA, 17 nt, Homo sapiens
gcgcugccccugagccg

SEQ ID NO: 587 - RNA, 17 nt, Homo sapiens
cgcugccccugagccgg

SEQ ID NO: 588 - RNA, 17 nt, Homo sapiens
gcugccccugagccgga

SEQ ID NO: 589 - RNA, 17 nt, Homo sapiens
cccugagccggagcgga

SEQ ID NO: 590 - RNA, 17 nt, Homo sapiens
gcggacgcccguugggc

SEQ ID NO: 591 - RNA, 17 nt, Homo sapiens
cggacgcccguugggca

SEQ ID NO: 592 - RNA, 17 nt, Homo sapiens
cguugggcagggguccu

SEQ ID NO: 593 - RNA, 17 nt, Homo sapiens
cagggguccugggccca

SEQ ID NO: 594 - RNA, 17 nt, Homo sapiens
agggguccugggcccac

SEQ ID NO: 595 - RNA, 17 nt, Homo sapiens
uccugggcccacccggg

SEQ ID NO: 596 - RNA, 17 nt, Homo sapiens
ccugggcccacccgggc

SEQ ID NO: 597 - RNA, 17 nt, Homo sapiens
cugggcccacccgggca

SEQ ID NO: 598 - RNA, 17 nt, Homo sapiens
gggcccacccgggcagg

SEQ ID NO: 599 - RNA, 17 nt, Homo sapiens
ggcccacccgggcagga

SEQ ID NO: 600 - RNA, 17 nt, Homo sapiens
acccgggcaggacgcgu

SEQ ID NO: 601 - RNA, 17 nt, Homo sapiens
gcguggaccgagugacc

SEQ ID NO: 602 - RNA, 17 nt, Homo sapiens
cgagugaccgugguuuc

SEQ ID NO: 603 - RNA, 17 nt, Homo sapiens
gugguuucuguguggug

SEQ ID NO: 604 - RNA, 17 nt, Homo sapiens
guggugucaccugccag

SEQ ID NO: 605 - RNA, 17 nt, Homo sapiens
ggugucaccugccagac

SEQ ID NO: 606 - RNA, 17 nt, Homo sapiens
gugucaccugccagacc

SEQ ID NO: 607 - RNA, 17 nt, Homo sapiens
ucaccugccagacccgc

SEQ ID NO: 608 - RNA, 17 nt, Homo sapiens
caccugccagacccgcc

SEQ ID NO: 609 - RNA, 17 nt, Homo sapiens
ugccagacccgccgaag

SEQ ID NO: 610 - RNA, 17 nt, Homo sapiens
gccagacccgccgaaga

SEQ ID NO: 611 - RNA, 17 nt, Homo sapiens
agacccgccgaagaagc

SEQ ID NO: 612 - RNA, 17 nt, Homo sapiens
gaagaagccaccucuuu

SEQ ID NO: 613 - RNA, 17 nt, Homo sapiens
aagaagccaccucuuug

SEQ ID NO: 614 - RNA, 17 nt, Homo sapiens
gaagccaccucuuugga

SEQ ID NO: 615 - RNA, 17 nt, Homo sapiens
aagccaccucuuuggag

SEQ ID NO: 616 - RNA, 17 nt, Homo sapiens
gccaccucuuuggaggg

SEQ ID NO: 617 - RNA, 17 nt, Homo sapiens
gggugcgcucucuggca

SEQ ID NO: 618 - RNA, 17 nt, Homo sapiens
gugcgcucucuggcacg

SEQ ID NO: 619 - RNA, 17 nt, Homo sapiens
gcgcucucuggcacgcg

SEQ ID NO: 620 - RNA, 17 nt, Homo sapiens
ucucuggcacgcgccac

SEQ ID NO: 621 - RNA, 17 nt, Homo sapiens
gcacgcgccacucccac

SEQ ID NO: 622 - RNA, 17 nt, Homo sapiens
cacgcgccacucccacc

SEQ ID NO: 623 - RNA, 17 nt, Homo sapiens
cgcgccacucccaccca

SEQ ID NO: 624 - RNA, 17 nt, Homo sapiens
cgccacucccacccauc

SEQ ID NO: 625 - RNA, 17 nt, Homo sapiens
gccacucccacccaucc

SEQ ID NO: 626 - RNA, 17 nt, Homo sapiens
ccacucccacccauccg

SEQ ID NO: 627 - RNA, 17 nt, Homo sapiens
acucccacccauccgug

SEQ ID NO: 628 - RNA, 17 nt, Homo sapiens
cucccacccauccgugg

SEQ ID NO: 629 - RNA, 17 nt, Homo sapiens
ucccacccauccguggg

SEQ ID NO: 630 - RNA, 17 nt, Homo sapiens
cacccauccgugggccg

SEQ ID NO: 631 - RNA, 17 nt, Homo sapiens
ccgugggccgccagcac

SEQ ID NO: 632 - RNA, 17 nt, Homo sapiens
ugggccgccagcaccac

SEQ ID NO: 633 - RNA, 17 nt, Homo sapiens
gggccgccagcaccacg

SEQ ID NO: 634 - RNA, 17 nt, Homo sapiens
ccgccagcaccacgcgg

SEQ ID NO: 635 - RNA, 17 nt, Homo sapiens
gccagcaccacgcgggc

SEQ ID NO: 636 - RNA, 17 nt, Homo sapiens
ccagcaccacgcgggcc

SEQ ID NO: 637 - RNA, 17 nt, Homo sapiens
acgcgggccccccaucc

SEQ ID NO: 638 - RNA, 17 nt, Homo sapiens
cgcgggccccccaucca

SEQ ID NO: 639 - RNA, 17 nt, Homo sapiens
gcgggccccccauccac

SEQ ID NO: 640 - RNA, 17 nt, Homo sapiens
cgggccccccauccaca

SEQ ID NO: 641 - RNA, 17 nt, Homo sapiens
gggccccccauccacau

SEQ ID NO: 642 - RNA, 17 nt, Homo sapiens
ggccccccauccacauc

SEQ ID NO: 643 - RNA, 17 nt, Homo sapiens
cccccauccacaucgcg

SEQ ID NO: 644 - RNA, 17 nt, Homo sapiens
ccccauccacaucgcgg

SEQ ID NO: 645 - RNA, 17 nt, Homo sapiens
ccauccacaucgcggcc

SEQ ID NO: 646 - RNA, 17 nt, Homo sapiens
aucgcggccaccacguc

SEQ ID NO: 647 - RNA, 17 nt, Homo sapiens
ucgcggccaccacgucc

SEQ ID NO: 648 - RNA, 17 nt, Homo sapiens
gcggccaccacgucccu

SEQ ID NO: 649 - RNA, 17 nt, Homo sapiens
cggccaccacgucccug

SEQ ID NO: 650 - RNA, 17 nt, Homo sapiens
accacgucccugggaca

SEQ ID NO: 651 - RNA, 17 nt, Homo sapiens
ccacgucccugggacac

SEQ ID NO: 652 - RNA, 17 nt, Homo sapiens
cacgucccugggacacg

SEQ ID NO: 653 - RNA, 17 nt, Homo sapiens
ccugggacacgccuugu

SEQ ID NO: 654 - RNA, 17 nt, Homo sapiens
ggacacgccuugucccc

SEQ ID NO: 655 - RNA, 17 nt, Homo sapiens
gacacgccuuguccccc

SEQ ID NO: 656 - RNA, 17 nt, Homo sapiens
gccuugucccccggugu

SEQ ID NO: 657 - RNA, 17 nt, Homo sapiens
ccuugucccccggugua

SEQ ID NO: 658 - RNA, 17 nt, Homo sapiens
cuugucccccgguguac

SEQ ID NO: 659 - RNA, 17 nt, Homo sapiens
uugucccccgguguacg

SEQ ID NO: 660 - RNA, 17 nt, Homo sapiens
guguacgccgagaccaa

SEQ ID NO: 661 - RNA, 17 nt, Homo sapiens
gccgagaccaagcacuu

SEQ ID NO: 662 - RNA, 17 nt, Homo sapiens
ccgagaccaagcacuuc

SEQ ID NO: 663 - RNA, 17 nt, Homo sapiens
gaccaagcacuuccucu

SEQ ID NO: 664 - RNA, 17 nt, Homo sapiens
ccaagcacuuccucuac

SEQ ID NO: 665 - RNA, 17 nt, Homo sapiens
agcacuuccucuacucc

SEQ ID NO: 666 - RNA, 17 nt, Homo sapiens
gcacuuccucuacuccu

SEQ ID NO: 667 - RNA, 17 nt, Homo sapiens
acuuccucuacuccuca

SEQ ID NO: 668 - RNA, 17 nt, Homo sapiens
uccucuacuccucaggc

SEQ ID NO: 669 - RNA, 17 nt, Homo sapiens
cucuacuccucaggcga

SEQ ID NO: 670 - RNA, 17 nt, Homo sapiens
ucuacuccucaggcgac

SEQ ID NO: 671 - RNA, 17 nt, Homo sapiens
uacuccucaggcgacaa

SEQ ID NO: 672 - RNA, 17 nt, Homo sapiens
caggcgacaaggagcag

SEQ ID NO: 673 - RNA, 17 nt, Homo sapiens
caaggagcagcugcggc

SEQ ID NO: 674 - RNA, 17 nt, Homo sapiens
ggagcagcugcggcccu

SEQ ID NO: 675 - RNA, 17 nt, Homo sapiens
gcugcggcccuccuucc

SEQ ID NO: 676 - RNA, 17 nt, Homo sapiens
cugcggcccuccuuccu

SEQ ID NO: 677 - RNA, 17 nt, Homo sapiens
ugcggcccuccuuccua

SEQ ID NO: 678 - RNA, 17 nt, Homo sapiens
cggcccuccuuccuacu

SEQ ID NO: 679 - RNA, 17 nt, Homo sapiens
ggcccuccuuccuacuc

SEQ ID NO: 680 - RNA, 17 nt, Homo sapiens
ccuccuuccuacucagc

SEQ ID NO: 681 - RNA, 17 nt, Homo sapiens
cuccuuccuacucagcu

SEQ ID NO: 682 - RNA, 17 nt, Homo sapiens
cuuccuacucagcucuc

SEQ ID NO: 683 - RNA, 17 nt, Homo sapiens
uccuacucagcucucug

SEQ ID NO: 684 - RNA, 17 nt, Homo sapiens
uacucagcucucugagg

SEQ ID NO: 685 - RNA, 17 nt, Homo sapiens
cucagcucucugaggcc

SEQ ID NO: 686 - RNA, 17 nt, Homo sapiens
cagcucucugaggccca

SEQ ID NO: 687 - RNA, 17 nt, Homo sapiens
ucugaggcccagccuga

SEQ ID NO: 688 - RNA, 17 nt, Homo sapiens
cugaggcccagccugac

SEQ ID NO: 689 - RNA, 17 nt, Homo sapiens
ugaggcccagccugacu

SEQ ID NO: 690 - RNA, 17 nt, Homo sapiens
ggcccagccugacuggc

SEQ ID NO: 691 - RNA, 17 nt, Homo sapiens
gcccagccugacuggcg

SEQ ID NO: 692 - RNA, 17 nt, Homo sapiens
agccugacuggcgcucg

SEQ ID NO: 693 - RNA, 17 nt, Homo sapiens
acuggcgcucggaggcu

SEQ ID NO: 694 - RNA, 17 nt, Homo sapiens
ucggaggcucguggaga

SEQ ID NO: 695 - RNA, 17 nt, Homo sapiens
guggagaccaucuuucu

SEQ ID NO: 696 - RNA, 17 nt, Homo sapiens
uggagaccaucuuucug

SEQ ID NO: 697 - RNA, 17 nt, Homo sapiens
agaccaucuuucugggu

SEQ ID NO: 698 - RNA, 17 nt, Homo sapiens
caucuuucuggguucca

SEQ ID NO: 699 - RNA, 17 nt, Homo sapiens
cuggguuccaggcccug

SEQ ID NO: 700 - RNA, 17 nt, Homo sapiens
uggguuccaggcccugg

SEQ ID NO: 701 - RNA, 17 nt, Homo sapiens
uuccaggcccuggaugc

SEQ ID NO: 702 - RNA, 17 nt, Homo sapiens
uccaggcccuggaugcc

SEQ ID NO: 703 - RNA, 17 nt, Homo sapiens
ccaggcccuggaugcca

SEQ ID NO: 704 - RNA, 17 nt, Homo sapiens
cuggaugccagggacuc

SEQ ID NO: 705 - RNA, 17 nt, Homo sapiens
uggaugccagggacucc

SEQ ID NO: 706 - RNA, 17 nt, Homo sapiens
ccagggacuccccgcag

SEQ ID NO: 707 - RNA, 17 nt, Homo sapiens
agggacuccccgcaggu

SEQ ID NO: 708 - RNA, 17 nt, Homo sapiens
gggacuccccgcagguu

SEQ ID NO: 709 - RNA, 17 nt, Homo sapiens
ggacuccccgcagguug

SEQ ID NO: 710 - RNA, 17 nt, Homo sapiens
cuccccgcagguugccc

SEQ ID NO: 711 - RNA, 17 nt, Homo sapiens
cagguugccccgccugc

SEQ ID NO: 712 - RNA, 17 nt, Homo sapiens
agguugccccgccugcc

SEQ ID NO: 713 - RNA, 17 nt, Homo sapiens
gguugccccgccugccc

SEQ ID NO: 714 - RNA, 17 nt, Homo sapiens
ugccccgccugccccag

SEQ ID NO: 715 - RNA, 17 nt, Homo sapiens
gccccgccugccccagc

SEQ ID NO: 716 - RNA, 17 nt, Homo sapiens
ccgccugccccagcgcu

SEQ ID NO: 717 - RNA, 17 nt, Homo sapiens
cgccugccccagcgcua

SEQ ID NO: 718 - RNA, 17 nt, Homo sapiens
gccugccccagcgcuac

SEQ ID NO: 719 - RNA, 17 nt, Homo sapiens
ccugccccagcgcuacu

SEQ ID NO: 720 - RNA, 17 nt, Homo sapiens
cccagcgcuacuggcaa

SEQ ID NO: 721 - RNA, 17 nt, Homo sapiens
agcgcuacuggcaaaug

SEQ ID NO: 722 - RNA, 17 nt, Homo sapiens
cuacuggcaaaugcggc

SEQ ID NO: 723 - RNA, 17 nt, Homo sapiens
aaugcggccccuguuuc

SEQ ID NO: 724 - RNA, 17 nt, Homo sapiens
augcggccccuguuucu

SEQ ID NO: 725 - RNA, 17 nt, Homo sapiens
ugcggccccuguuucug

SEQ ID NO: 726 - RNA, 17 nt, Homo sapiens
gcggccccuguuucugg

SEQ ID NO: 727 - RNA, 17 nt, Homo sapiens
ccuguuucuggagcugc

SEQ ID NO: 728 - RNA, 17 nt, Homo sapiens
ucuggagcugcuuggga

SEQ ID NO: 729 - RNA, 17 nt, Homo sapiens
ggagcugcuugggaacc

SEQ ID NO: 730 - RNA, 17 nt, Homo sapiens
uugggaaccacgcgcag

SEQ ID NO: 731 - RNA, 17 nt, Homo sapiens
ugggaaccacgcgcagu

SEQ ID NO: 732 - RNA, 17 nt, Homo sapiens
ccacgcgcagugccccu

SEQ ID NO: 733 - RNA, 17 nt, Homo sapiens
cgcagugccccuacggg

SEQ ID NO: 734 - RNA, 17 nt, Homo sapiens
gcagugccccuacgggg

SEQ ID NO: 735 - RNA, 17 nt, Homo sapiens
cagugccccuacggggu

SEQ ID NO: 736 - RNA, 17 nt, Homo sapiens
agugccccuacggggug

SEQ ID NO: 737 - RNA, 17 nt, Homo sapiens
cggggugcuccucaaga

SEQ ID NO: 738 - RNA, 17 nt, Homo sapiens
gggugcuccucaagacg

SEQ ID NO: 739 - RNA, 17 nt, Homo sapiens
ggugcuccucaagacgc

SEQ ID NO: 740 - RNA, 17 nt, Homo sapiens
ugcuccucaagacgcac

SEQ ID NO: 741 - RNA, 17 nt, Homo sapiens
caagacgcacugcccgc

SEQ ID NO: 742 - RNA, 17 nt, Homo sapiens
agacgcacugcccgcug

SEQ ID NO: 743 - RNA, 17 nt, Homo sapiens
cgcacugcccgcugcga

SEQ ID NO: 744 - RNA, 17 nt, Homo sapiens
gcacugcccgcugcgag

SEQ ID NO: 745 - RNA, 17 nt, Homo sapiens
cugcccgcugcgagcug

SEQ ID NO: 746 - RNA, 17 nt, Homo sapiens
cugcgagcugcggucac

SEQ ID NO: 747 - RNA, 17 nt, Homo sapiens
cugcggucaccccagca

SEQ ID NO: 748 - RNA, 17 nt, Homo sapiens
gcggucaccccagcagc

SEQ ID NO: 749 - RNA, 17 nt, Homo sapiens
cggucaccccagcagcc

SEQ ID NO: 750 - RNA, 17 nt, Homo sapiens
ggucaccccagcagccg

SEQ ID NO: 751 - RNA, 17 nt, Homo sapiens
gucaccccagcagccgg

SEQ ID NO: 752 - RNA, 17 nt, Homo sapiens
accccagcagccggugu

SEQ ID NO: 753 - RNA, 17 nt, Homo sapiens
ccagcagccggugucug

SEQ ID NO: 754 - RNA, 17 nt, Homo sapiens
ccggugucugugcccgg

SEQ ID NO: 755 - RNA, 17 nt, Homo sapiens
gucugugcccgggagaa

SEQ ID NO: 756 - RNA, 17 nt, Homo sapiens
ucugugcccgggagaag

SEQ ID NO: 757 - RNA, 17 nt, Homo sapiens
ggagaagccccagggcu

SEQ ID NO: 758 - RNA, 17 nt, Homo sapiens
gagaagccccagggcuc

SEQ ID NO: 759 - RNA, 17 nt, Homo sapiens
agaagccccagggcucu

SEQ ID NO: 760 - RNA, 17 nt, Homo sapiens
gaagccccagggcucug

SEQ ID NO: 761 - RNA, 17 nt, Homo sapiens
cccagggcucuguggcg

SEQ ID NO: 762 - RNA, 17 nt, Homo sapiens
cagggcucuguggcggc

SEQ ID NO: 763 - RNA, 17 nt, Homo sapiens
guggcggcccccgagga

SEQ ID NO: 764 - RNA, 17 nt, Homo sapiens
uggcggcccccgaggag

SEQ ID NO: 765 - RNA, 17 nt, Homo sapiens
ggcggcccccgaggagg

SEQ ID NO: 766 - RNA, 17 nt, Homo sapiens
gcggcccccgaggagga

SEQ ID NO: 767 - RNA, 17 nt, Homo sapiens
aggaggacacagacccc

SEQ ID NO: 768 - RNA, 17 nt, Homo sapiens
gaggacacagacccccg

SEQ ID NO: 769 - RNA, 17 nt, Homo sapiens
acacagacccccgucgc

SEQ ID NO: 770 - RNA, 17 nt, Homo sapiens
cacagacccccgucgcc

SEQ ID NO: 771 - RNA, 17 nt, Homo sapiens
acagacccccgucgccu

SEQ ID NO: 772 - RNA, 17 nt, Homo sapiens
cagacccccgucgccug

SEQ ID NO: 773 - RNA, 17 nt, Homo sapiens
cccgucgccuggugcag

SEQ ID NO: 774 - RNA, 17 nt, Homo sapiens
ccgucgccuggugcagc

SEQ ID NO: 775 - RNA, 17 nt, Homo sapiens
ccuggugcagcugcucc

SEQ ID NO: 776 - RNA, 17 nt, Homo sapiens
ggugcagcugcuccgcc

SEQ ID NO: 777 - RNA, 17 nt, Homo sapiens
gcagcugcuccgccagc

SEQ ID NO: 778 - RNA, 17 nt, Homo sapiens
agcugcuccgccagcac

SEQ ID NO: 779 - RNA, 17 nt, Homo sapiens
ugcuccgccagcacagc

SEQ ID NO: 780 - RNA, 17 nt, Homo sapiens
gcuccgccagcacagca

SEQ ID NO: 781 - RNA, 17 nt, Homo sapiens
ccgccagcacagcagcc

SEQ ID NO: 782 - RNA, 17 nt, Homo sapiens
gccagcacagcagcccc

SEQ ID NO: 783 - RNA, 17 nt, Homo sapiens
agcacagcagccccugg

SEQ ID NO: 784 - RNA, 17 nt, Homo sapiens
acagcagccccuggcag

SEQ ID NO: 785 - RNA, 17 nt, Homo sapiens
cagcagccccuggcagg

SEQ ID NO: 786 - RNA, 17 nt, Homo sapiens
agcagccccuggcaggu

SEQ ID NO: 787 - RNA, 17 nt, Homo sapiens
gcagccccuggcaggug

SEQ ID NO: 788 - RNA, 17 nt, Homo sapiens
ccccuggcagguguacg

SEQ ID NO: 789 - RNA, 17 nt, Homo sapiens
uguacggcuucgugcgg

SEQ ID NO: 790 - RNA, 17 nt, Homo sapiens
gugcgggccugccugcg

SEQ ID NO: 791 - RNA, 17 nt, Homo sapiens
ugcgggccugccugcgc

SEQ ID NO: 792 - RNA, 17 nt, Homo sapiens
gggccugccugcgccgg

SEQ ID NO: 793 - RNA, 17 nt, Homo sapiens
ggccugccugcgccggc

SEQ ID NO: 794 - RNA, 17 nt, Homo sapiens
gccugcgccggcuggug

SEQ ID NO: 795 - RNA, 17 nt, Homo sapiens
gcgccggcuggugcccc

SEQ ID NO: 796 - RNA, 17 nt, Homo sapiens
gcuggugcccccaggcc

SEQ ID NO: 797 - RNA, 17 nt, Homo sapiens
cuggugcccccaggccu

SEQ ID NO: 798 - RNA, 17 nt, Homo sapiens
uggugcccccaggccuc

SEQ ID NO: 799 - RNA, 17 nt, Homo sapiens
ggugcccccaggccucu

SEQ ID NO: 800 - RNA, 17 nt, Homo sapiens
gugcccccaggccucug

SEQ ID NO: 801 - RNA, 17 nt, Homo sapiens
ccccaggccucuggggc

SEQ ID NO: 802 - RNA, 17 nt, Homo sapiens
cccaggccucuggggcu

SEQ ID NO: 803 - RNA, 17 nt, Homo sapiens
caggccucuggggcucc

SEQ ID NO: 804 - RNA, 17 nt, Homo sapiens
ucuggggcuccaggcac

SEQ ID NO: 805 - RNA, 17 nt, Homo sapiens
uggggcuccaggcacaa

SEQ ID NO: 806 - RNA, 17 nt, Homo sapiens
ggggcuccaggcacaac

SEQ ID NO: 807 - RNA, 17 nt, Homo sapiens
cuccaggcacaacgaac

SEQ ID NO: 808 - RNA, 17 nt, Homo sapiens
ccaggcacaacgaacgc

SEQ ID NO: 809 - RNA, 17 nt, Homo sapiens
acgaacgccgcuuccuc

SEQ ID NO: 810 - RNA, 17 nt, Homo sapiens
aacgccgcuuccucagg

SEQ ID NO: 811 - RNA, 17 nt, Homo sapiens
gccgcuuccucaggaac

SEQ ID NO: 812 - RNA, 17 nt, Homo sapiens
ccgcuuccucaggaaca

SEQ ID NO: 813 - RNA, 17 nt, Homo sapiens
gcuuccucaggaacacc

SEQ ID NO: 814 - RNA, 17 nt, Homo sapiens
ucaggaacaccaagaag

SEQ ID NO: 815 - RNA, 17 nt, Homo sapiens
aggaacaccaagaaguu

SEQ ID NO: 816 - RNA, 17 nt, Homo sapiens
ggaacaccaagaaguuc

SEQ ID NO: 817 - RNA, 17 nt, Homo sapiens
agaaguucaucucccug

SEQ ID NO: 818 - RNA, 17 nt, Homo sapiens
aguucaucucccugggg

SEQ ID NO: 819 - RNA, 17 nt, Homo sapiens
uucaucucccuggggaa

SEQ ID NO: 820 - RNA, 17 nt, Homo sapiens
ucaucucccuggggaag

SEQ ID NO: 821 - RNA, 17 nt, Homo sapiens
caucucccuggggaagc

SEQ ID NO: 822 - RNA, 17 nt, Homo sapiens
ggggaagcaugccaagc

SEQ ID NO: 823 - RNA, 17 nt, Homo sapiens
aagcaugccaagcucuc

SEQ ID NO: 824 - RNA, 17 nt, Homo sapiens
agcaugccaagcucucg

SEQ ID NO: 825 - RNA, 17 nt, Homo sapiens
ugccaagcucucgcugc

SEQ ID NO: 826 - RNA, 17 nt, Homo sapiens
ccaagcucucgcugcag

SEQ ID NO: 827 - RNA, 17 nt, Homo sapiens
gcucucgcugcaggagc

SEQ ID NO: 828 - RNA, 17 nt, Homo sapiens
cucgcugcaggagcuga

SEQ ID NO: 829 - RNA, 17 nt, Homo sapiens
gcaggagcugacgugga

SEQ ID NO: 830 - RNA, 17 nt, Homo sapiens
ugcgggacugcgcuugg

SEQ ID NO: 831 - RNA, 17 nt, Homo sapiens
gacugcgcuuggcugcg

SEQ ID NO: 832 - RNA, 17 nt, Homo sapiens
cgcuuggcugcgcagga

SEQ ID NO: 833 - RNA, 17 nt, Homo sapiens
ggcugcgcaggagccca

SEQ ID NO: 834 - RNA, 17 nt, Homo sapiens
gcaggagcccagggguu

SEQ ID NO: 835 - RNA, 17 nt, Homo sapiens
caggagcccagggguug

SEQ ID NO: 836 - RNA, 17 nt, Homo sapiens
aggagcccagggguugg

SEQ ID NO: 837 - RNA, 17 nt, Homo sapiens
ggguuggcuguguuccg

SEQ ID NO: 838 - RNA, 17 nt, Homo sapiens
cuguguuccggccgcag

SEQ ID NO: 839 - RNA, 17 nt, Homo sapiens
guuccggccgcagagca

SEQ ID NO: 840 - RNA, 17 nt, Homo sapiens
ccggccgcagagcaccg

SEQ ID NO: 841 - RNA, 17 nt, Homo sapiens
cgcagagcaccgucugc

SEQ ID NO: 842 - RNA, 17 nt, Homo sapiens
cagagcaccgucugcgu

SEQ ID NO: 843 - RNA, 17 nt, Homo sapiens
gcaccgucugcgugagg

SEQ ID NO: 844 - RNA, 17 nt, Homo sapiens
aggagauccuggccaag

SEQ ID NO: 845 - RNA, 17 nt, Homo sapiens
ggagauccuggccaagu

SEQ ID NO: 846 - RNA, 17 nt, Homo sapiens
auccuggccaaguuccu

SEQ ID NO: 847 - RNA, 17 nt, Homo sapiens
uccuggccaaguuccug

SEQ ID NO: 848 - RNA, 17 nt, Homo sapiens
ccaaguuccugcacugg

SEQ ID NO: 849 - RNA, 17 nt, Homo sapiens
caaguuccugcacuggc

SEQ ID NO: 850 - RNA, 17 nt, Homo sapiens
guuccugcacuggcuga

SEQ ID NO: 851 - RNA, 17 nt, Homo sapiens
uccugcacuggcugaug

SEQ ID NO: 852 - RNA, 17 nt, Homo sapiens
gcacuggcugaugagug

SEQ ID NO: 853 - RNA, 17 nt, Homo sapiens
cgucgagcugcucaggu

SEQ ID NO: 854 - RNA, 17 nt, Homo sapiens
cgagcugcucaggucuu

SEQ ID NO: 855 - RNA, 17 nt, Homo sapiens
agcugcucaggucuuuc

SEQ ID NO: 856 - RNA, 17 nt, Homo sapiens
cucaggucuuucuuuua

SEQ ID NO: 857 - RNA, 17 nt, Homo sapiens
ggucuuucuuuuauguc

SEQ ID NO: 858 - RNA, 17 nt, Homo sapiens
uuuaugucacggagacc

SEQ ID NO: 859 - RNA, 17 nt, Homo sapiens
acggagaccacguuuca

SEQ ID NO: 860 - RNA, 17 nt, Homo sapiens
cggagaccacguuucaa

SEQ ID NO: 861 - RNA, 17 nt, Homo sapiens
cacguuucaaaagaaca

SEQ ID NO: 862 - RNA, 17 nt, Homo sapiens
aaaagaacaggcucuuu

SEQ ID NO: 863 - RNA, 17 nt, Homo sapiens
gaacaggcucuuuuucu

SEQ ID NO: 864 - RNA, 17 nt, Homo sapiens
acaggcucuuuuucuac

SEQ ID NO: 865 - RNA, 17 nt, Homo sapiens
ucuuuuucuaccggaag

SEQ ID NO: 866 - RNA, 17 nt, Homo sapiens
uuuucuaccggaagagu

SEQ ID NO: 867 - RNA, 17 nt, Homo sapiens
agagugucuggagcaag

SEQ ID NO: 868 - RNA, 17 nt, Homo sapiens
ucuggagcaaguugcaa

SEQ ID NO: 869 - RNA, 17 nt, Homo sapiens
caaguugcaaagcauug

SEQ ID NO: 870 - RNA, 17 nt, Homo sapiens
ugcaaagcauuggaauc

SEQ ID NO: 871 - RNA, 17 nt, Homo sapiens
uuggaaucagacagcac

SEQ ID NO: 872 - RNA, 17 nt, Homo sapiens
aaucagacagcacuuga

SEQ ID NO: 873 - RNA, 17 nt, Homo sapiens
cagacagcacuugaaga

SEQ ID NO: 874 - RNA, 17 nt, Homo sapiens
gacagcacuugaagagg

SEQ ID NO: 875 - RNA, 17 nt, Homo sapiens
gagggugcagcugcggg

SEQ ID NO: 876 - RNA, 17 nt, Homo sapiens
ggugcagcugcgggagc

SEQ ID NO: 877 - RNA, 17 nt, Homo sapiens
gcgggagcugucggaag

SEQ ID NO: 878 - RNA, 17 nt, Homo sapiens
ucggaagcagaggucag

SEQ ID NO: 879 - RNA, 17 nt, Homo sapiens
cagaggucaggcagcau

SEQ ID NO: 880 - RNA, 17 nt, Homo sapiens
ggucaggcagcaucggg

SEQ ID NO: 881 - RNA, 17 nt, Homo sapiens
caggcagcaucgggaag

SEQ ID NO: 882 - RNA, 17 nt, Homo sapiens
cgggaagccaggcccgc

SEQ ID NO: 883 - RNA, 17 nt, Homo sapiens
gggaagccaggcccgcc

SEQ ID NO: 884 - RNA, 17 nt, Homo sapiens
agccaggcccgcccugc

SEQ ID NO: 885 - RNA, 17 nt, Homo sapiens
gccaggcccgcccugcu

SEQ ID NO: 886 - RNA, 17 nt, Homo sapiens
aggcccgcccugcugac

SEQ ID NO: 887 - RNA, 17 nt, Homo sapiens
ggcccgcccugcugacg

SEQ ID NO: 888 - RNA, 17 nt, Homo sapiens
gcccgcccugcugacgu

SEQ ID NO: 889 - RNA, 17 nt, Homo sapiens
cgcccugcugacgucca

SEQ ID NO: 890 - RNA, 17 nt, Homo sapiens
cugacguccagacuccg

SEQ ID NO: 891 - RNA, 17 nt, Homo sapiens
ugacguccagacuccgc

SEQ ID NO: 892 - RNA, 17 nt, Homo sapiens
guccagacuccgcuuca

SEQ ID NO: 893 - RNA, 17 nt, Homo sapiens
ccagacuccgcuucauc

SEQ ID NO: 894 - RNA, 17 nt, Homo sapiens
gacuccgcuucaucccc

SEQ ID NO: 895 - RNA, 17 nt, Homo sapiens
uccgcuucauccccaag

SEQ ID NO: 896 - RNA, 17 nt, Homo sapiens
gcuucauccccaagccu

SEQ ID NO: 897 - RNA, 17 nt, Homo sapiens
cuucauccccaagccug

SEQ ID NO: 898 - RNA, 17 nt, Homo sapiens
uucauccccaagccuga

SEQ ID NO: 899 - RNA, 17 nt, Homo sapiens
ucauccccaagccugac

SEQ ID NO: 900 - RNA, 17 nt, Homo sapiens
ccccaagccugacgggc

SEQ ID NO: 901 - RNA, 17 nt, Homo sapiens
cccaagccugacgggcu

SEQ ID NO: 902 - RNA, 17 nt, Homo sapiens
ugacgggcugcggccga

SEQ ID NO: 903 - RNA, 17 nt, Homo sapiens
gcugcggccgauuguga

SEQ ID NO: 904 - RNA, 17 nt, Homo sapiens
uugugaacauggacuac

SEQ ID NO: 905 - RNA, 17 nt, Homo sapiens
acauggacuacgucgug

SEQ ID NO: 906 - RNA, 17 nt, Homo sapiens
gugggagccagaacguu

SEQ ID NO: 907 - RNA, 17 nt, Homo sapiens
ugggagccagaacguuc

SEQ ID NO: 908 - RNA, 17 nt, Homo sapiens
gaacguuccgcagagaa

SEQ ID NO: 909 - RNA, 17 nt, Homo sapiens
cguuccgcagagaaaag

SEQ ID NO: 910 - RNA, 17 nt, Homo sapiens
aagagggccgagcgucu

SEQ ID NO: 911 - RNA, 17 nt, Homo sapiens
cgagcgucucaccucga

SEQ ID NO: 912 - RNA, 17 nt, Homo sapiens
agcgucucaccucgagg

SEQ ID NO: 913 - RNA, 17 nt, Homo sapiens
cgucucaccucgagggu

SEQ ID NO: 914 - RNA, 17 nt, Homo sapiens
gucucaccucgagggug

SEQ ID NO: 915 - RNA, 17 nt, Homo sapiens
gugaaggcacuguucag

SEQ ID NO: 916 - RNA, 17 nt, Homo sapiens
gaaggcacuguucagcg

SEQ ID NO: 917 - RNA, 17 nt, Homo sapiens
cacuguucagcgugcuc

SEQ ID NO: 918 - RNA, 17 nt, Homo sapiens
cagcgugcucaacuacg

SEQ ID NO: 919 - RNA, 17 nt, Homo sapiens
gcgugcucaacuacgag

SEQ ID NO: 920 - RNA, 17 nt, Homo sapiens
ugcucaacuacgagcgg

SEQ ID NO: 921 - RNA, 17 nt, Homo sapiens
cgcggcgccccggccuc

SEQ ID NO: 922 - RNA, 17 nt, Homo sapiens
gcggcgccccggccucc

SEQ ID NO: 923 - RNA, 17 nt, Homo sapiens
cggcgccccggccuccu

SEQ ID NO: 924 - RNA, 17 nt, Homo sapiens
gccccggccuccugggc

SEQ ID NO: 925 - RNA, 17 nt, Homo sapiens
ccccggccuccugggcg

SEQ ID NO: 926 - RNA, 17 nt, Homo sapiens
ccggccuccugggcgcc

SEQ ID NO: 927 - RNA, 17 nt, Homo sapiens
cggccuccugggcgccu

SEQ ID NO: 928 - RNA, 17 nt, Homo sapiens
cugggcgccucugugcu

SEQ ID NO: 929 - RNA, 17 nt, Homo sapiens
ugggcgccucugugcug

SEQ ID NO: 930 - RNA, 17 nt, Homo sapiens
ggcgccucugugcuggg

SEQ ID NO: 931 - RNA, 17 nt, Homo sapiens
cucugugcugggccugg

SEQ ID NO: 932 - RNA, 17 nt, Homo sapiens
ugcugggccuggacgau

SEQ ID NO: 933 - RNA, 17 nt, Homo sapiens
gcugggccuggacgaua

SEQ ID NO: 934 - RNA, 17 nt, Homo sapiens
acgauauccacagggcc

SEQ ID NO: 935 - RNA, 17 nt, Homo sapiens
cgauauccacagggccu

SEQ ID NO: 936 - RNA, 17 nt, Homo sapiens
auauccacagggccugg

SEQ ID NO: 937 - RNA, 17 nt, Homo sapiens
cacagggccuggcgcac

SEQ ID NO: 938 - RNA, 17 nt, Homo sapiens
acagggccuggcgcacc

SEQ ID NO: 939 - RNA, 17 nt, Homo sapiens
ccuggcgcaccuucgug

SEQ ID NO: 940 - RNA, 17 nt, Homo sapiens
uggcgcaccuucgugcu

SEQ ID NO: 941 - RNA, 17 nt, Homo sapiens
ggcgcaccuucgugcug

SEQ ID NO: 942 - RNA, 17 nt, Homo sapiens
cuucgugcugcgugugc

SEQ ID NO: 943 - RNA, 17 nt, Homo sapiens
gugcgggcccaggaccc

SEQ ID NO: 944 - RNA, 17 nt, Homo sapiens
ugcgggcccaggacccg

SEQ ID NO: 945 - RNA, 17 nt, Homo sapiens
gcgggcccaggacccgc

SEQ ID NO: 946 - RNA, 17 nt, Homo sapiens
cccaggacccgccgccu

SEQ ID NO: 947 - RNA, 17 nt, Homo sapiens
ccaggacccgccgccug

SEQ ID NO: 948 - RNA, 17 nt, Homo sapiens
ggacccgccgccugagc

SEQ ID NO: 949 - RNA, 17 nt, Homo sapiens
cccgccgccugagcugu

SEQ ID NO: 950 - RNA, 17 nt, Homo sapiens
ccgccgccugagcugua

SEQ ID NO: 951 - RNA, 17 nt, Homo sapiens
gccugagcuguacuuug

SEQ ID NO: 952 - RNA, 17 nt, Homo sapiens
agcuguacuuugucaag

SEQ ID NO: 953 - RNA, 17 nt, Homo sapiens
acuuugucaagguggau

SEQ ID NO: 954 - RNA, 17 nt, Homo sapiens
cguacgacaccaucccc

SEQ ID NO: 955 - RNA, 17 nt, Homo sapiens
uacgacaccauccccca

SEQ ID NO: 956 - RNA, 17 nt, Homo sapiens
acgacaccaucccccag

SEQ ID NO: 957 - RNA, 17 nt, Homo sapiens
acaccaucccccaggac

SEQ ID NO: 958 - RNA, 17 nt, Homo sapiens
caccaucccccaggaca

SEQ ID NO: 959 - RNA, 17 nt, Homo sapiens
accaucccccaggacag

SEQ ID NO: 960 - RNA, 17 nt, Homo sapiens
ccaucccccaggacagg

SEQ ID NO: 961 - RNA, 17 nt, Homo sapiens
caucccccaggacaggc

SEQ ID NO: 962 - RNA, 17 nt, Homo sapiens
cccaggacaggcucacg

SEQ ID NO: 963 - RNA, 17 nt, Homo sapiens
ggacaggcucacggagg

SEQ ID NO: 964 - RNA, 17 nt, Homo sapiens
acaggcucacggagguc

SEQ ID NO: 965 - RNA, 17 nt, Homo sapiens
cggaggucaucgccagc

SEQ ID NO: 966 - RNA, 17 nt, Homo sapiens
gucaucgccagcaucau

SEQ ID NO: 967 - RNA, 17 nt, Homo sapiens
ucaucgccagcaucauc

SEQ ID NO: 968 - RNA, 17 nt, Homo sapiens
ucgccagcaucaucaaa

SEQ ID NO: 969 - RNA, 17 nt, Homo sapiens
ccagcaucaucaaaccc

SEQ ID NO: 970 - RNA, 17 nt, Homo sapiens
gcaucaucaaaccccag

SEQ ID NO: 971 - RNA, 17 nt, Homo sapiens
caucaaaccccagaaca

SEQ ID NO: 972 - RNA, 17 nt, Homo sapiens
aucaaaccccagaacac

SEQ ID NO: 973 - RNA, 17 nt, Homo sapiens
ucaaaccccagaacacg

SEQ ID NO: 974 - RNA, 17 nt, Homo sapiens
caaaccccagaacacgu

SEQ ID NO: 975 - RNA, 17 nt, Homo sapiens
cccagaacacguacugc

SEQ ID NO: 976 - RNA, 17 nt, Homo sapiens
acacguacugcgugcgu

SEQ ID NO: 977 - RNA, 17 nt, Homo sapiens
cgguaugccguggucca

SEQ ID NO: 978 - RNA, 17 nt, Homo sapiens
ccgugguccagaaggcc

SEQ ID NO: 979 - RNA, 17 nt, Homo sapiens
cgugguccagaaggccg

SEQ ID NO: 980 - RNA, 17 nt, Homo sapiens
cagaaggccgcccaugg

SEQ ID NO: 981 - RNA, 17 nt, Homo sapiens
aaggccgcccaugggca

SEQ ID NO: 982 - RNA, 17 nt, Homo sapiens
aggccgcccaugggcac

SEQ ID NO: 983 - RNA, 17 nt, Homo sapiens
ggccgcccaugggcacg

SEQ ID NO: 984 - RNA, 17 nt, Homo sapiens
ccaugggcacguccgca

SEQ ID NO: 985 - RNA, 17 nt, Homo sapiens
ggcacguccgcaaggcc

SEQ ID NO: 986 - RNA, 17 nt, Homo sapiens
acguccgcaaggccuuc

SEQ ID NO: 987 - RNA, 17 nt, Homo sapiens
cgcaaggccuucaagag

SEQ ID NO: 988 - RNA, 17 nt, Homo sapiens
gcaaggccuucaagagc

SEQ ID NO: 989 - RNA, 17 nt, Homo sapiens
aggccuucaagagccac

SEQ ID NO: 990 - RNA, 17 nt, Homo sapiens
ucaagagccacgucucu

SEQ ID NO: 991 - RNA, 17 nt, Homo sapiens
caagagccacgucucua

SEQ ID NO: 992 - RNA, 17 nt, Homo sapiens
gccacgucucuaccuug

SEQ ID NO: 993 - RNA, 17 nt, Homo sapiens
cacgucucuaccuugac

SEQ ID NO: 994 - RNA, 17 nt, Homo sapiens
gucucuaccuugacaga

SEQ ID NO: 995 - RNA, 17 nt, Homo sapiens
ucucuaccuugacagac

SEQ ID NO: 996 - RNA, 17 nt, Homo sapiens
accuugacagaccucca

SEQ ID NO: 997 - RNA, 17 nt, Homo sapiens
ugacagaccuccagccg

SEQ ID NO: 998 - RNA, 17 nt, Homo sapiens
gacagaccuccagccgu

SEQ ID NO: 999 - RNA, 17 nt, Homo sapiens
cagaccuccagccguac

SEQ ID NO: 1000 - RNA, 17 nt, Homo sapiens
agaccuccagccguaca

SEQ ID NO: 1001 - RNA, 17 nt, Homo sapiens
ccuccagccguacaugc

SEQ ID NO: 1002 - RNA, 17 nt, Homo sapiens
agccguacaugcgacag

SEQ ID NO: 1003 - RNA, 17 nt, Homo sapiens
caugcgacaguucgugg

SEQ ID NO: 1004 - RNA, 17 nt, Homo sapiens
uucguggcucaccugca

SEQ ID NO: 1005 - RNA, 17 nt, Homo sapiens
cguggcucaccugcagg

SEQ ID NO: 1006 - RNA, 17 nt, Homo sapiens
uggcucaccugcaggag

SEQ ID NO: 1007 - RNA, 17 nt, Homo sapiens
ggcucaccugcaggaga

SEQ ID NO: 1008 - RNA, 17 nt, Homo sapiens
ucaccugcaggagacca

SEQ ID NO: 1009 - RNA, 17 nt, Homo sapiens
caggagaccagcccgcu

SEQ ID NO: 1010 - RNA, 17 nt, Homo sapiens
aggagaccagcccgcug

SEQ ID NO: 1011 - RNA, 17 nt, Homo sapiens
agaccagcccgcugagg

SEQ ID NO: 1012 - RNA, 17 nt, Homo sapiens
gaccagcccgcugaggg

SEQ ID NO: 1013 - RNA, 17 nt, Homo sapiens
cagcccgcugagggaug

SEQ ID NO: 1014 - RNA, 17 nt, Homo sapiens
agggaugccgucgucau

SEQ ID NO: 1015 - RNA, 17 nt, Homo sapiens
ccgucgucaucgagcag

SEQ ID NO: 1016 - RNA, 17 nt, Homo sapiens
caucgagcagagcuccu

SEQ ID NO: 1017 - RNA, 17 nt, Homo sapiens
agcagagcuccucccug

SEQ ID NO: 1018 - RNA, 17 nt, Homo sapiens
cagagcuccucccugaa

SEQ ID NO: 1019 - RNA, 17 nt, Homo sapiens
agagcuccucccugaau

SEQ ID NO: 1020 - RNA, 17 nt, Homo sapiens
agcuccucccugaauga

SEQ ID NO: 1021 - RNA, 17 nt, Homo sapiens
gcuccucccugaaugag

SEQ ID NO: 1022 - RNA, 17 nt, Homo sapiens
cuccucccugaaugagg

SEQ ID NO: 1023 - RNA, 17 nt, Homo sapiens
aaugaggccagcagugg

SEQ ID NO: 1024 - RNA, 17 nt, Homo sapiens
augaggccagcaguggc

SEQ ID NO: 1025 - RNA, 17 nt, Homo sapiens
aggccagcaguggccuc

SEQ ID NO: 1026 - RNA, 17 nt, Homo sapiens
gcaguggccucuucgac

SEQ ID NO: 1027 - RNA, 17 nt, Homo sapiens
caguggccucuucgacg

SEQ ID NO: 1028 - RNA, 17 nt, Homo sapiens
guggccucuucgacguc

SEQ ID NO: 1029 - RNA, 17 nt, Homo sapiens
ucgacgucuuccuacgc

SEQ ID NO: 1030 - RNA, 17 nt, Homo sapiens
acgucuuccuacgcuuc

SEQ ID NO: 1031 - RNA, 17 nt, Homo sapiens
cgucuuccuacgcuuca

SEQ ID NO: 1032 - RNA, 17 nt, Homo sapiens
uccuacgcuucaugugc

SEQ ID NO: 1033 - RNA, 17 nt, Homo sapiens
uacgcuucaugugccac

SEQ ID NO: 1034 - RNA, 17 nt, Homo sapiens
ucaugugccaccacgcc

SEQ ID NO: 1035 - RNA, 17 nt, Homo sapiens
caugugccaccacgccg

SEQ ID NO: 1036 - RNA, 17 nt, Homo sapiens
ugugccaccacgccgug

SEQ ID NO: 1037 - RNA, 17 nt, Homo sapiens
gugccaccacgccgugc

SEQ ID NO: 1038 - RNA, 17 nt, Homo sapiens
caccacgccgugcgcau

SEQ ID NO: 1039 - RNA, 17 nt, Homo sapiens
ccgugcgcaucaggggc

SEQ ID NO: 1040 - RNA, 17 nt, Homo sapiens
ugcgcaucaggggcaag

SEQ ID NO: 1041 - RNA, 17 nt, Homo sapiens
ucaggggcaaguccuac

SEQ ID NO: 1042 - RNA, 17 nt, Homo sapiens
ggcaaguccuacgucca

SEQ ID NO: 1043 - RNA, 17 nt, Homo sapiens
gcaaguccuacguccag

SEQ ID NO: 1044 - RNA, 17 nt, Homo sapiens
ccuacguccagugccag

SEQ ID NO: 1045 - RNA, 17 nt, Homo sapiens
cuacguccagugccagg

SEQ ID NO: 1046 - RNA, 17 nt, Homo sapiens
uccagugccaggggauc

SEQ ID NO: 1047 - RNA, 17 nt, Homo sapiens
ccagugccaggggaucc

SEQ ID NO: 1048 - RNA, 17 nt, Homo sapiens
aggggaucccgcagggc

SEQ ID NO: 1049 - RNA, 17 nt, Homo sapiens
ggggaucccgcagggcu

SEQ ID NO: 1050 - RNA, 17 nt, Homo sapiens
gaucccgcagggcucca

SEQ ID NO: 1051 - RNA, 17 nt, Homo sapiens
cgcagggcuccauccuc

SEQ ID NO: 1052 - RNA, 17 nt, Homo sapiens
cagggcuccauccucuc

SEQ ID NO: 1053 - RNA, 17 nt, Homo sapiens
agggcuccauccucucc

SEQ ID NO: 1054 - RNA, 17 nt, Homo sapiens
gcuccauccucuccacg

SEQ ID NO: 1055 - RNA, 17 nt, Homo sapiens
cuccauccucuccacgc

SEQ ID NO: 1056 - RNA, 17 nt, Homo sapiens
ccauccucuccacgcug

SEQ ID NO: 1057 - RNA, 17 nt, Homo sapiens
auccucuccacgcugcu

SEQ ID NO: 1058 - RNA, 17 nt, Homo sapiens
uccucuccacgcugcuc

SEQ ID NO: 1059 - RNA, 17 nt, Homo sapiens
cuccacgcugcucugca

SEQ ID NO: 1060 - RNA, 17 nt, Homo sapiens
cacgcugcucugcagcc

SEQ ID NO: 1061 - RNA, 17 nt, Homo sapiens
cgcugcucugcagccug

SEQ ID NO: 1062 - RNA, 17 nt, Homo sapiens
ugcucugcagccugugc

SEQ ID NO: 1063 - RNA, 17 nt, Homo sapiens
ucugcagccugugcuac

SEQ ID NO: 1064 - RNA, 17 nt, Homo sapiens
cugcagccugugcuacg

SEQ ID NO: 1065 - RNA, 17 nt, Homo sapiens
gccugugcuacggcgac

SEQ ID NO: 1066 - RNA, 17 nt, Homo sapiens
acggcgacauggagaac

SEQ ID NO: 1067 - RNA, 17 nt, Homo sapiens
uggagaacaagcuguuu

SEQ ID NO: 1068 - RNA, 17 nt, Homo sapiens
gaacaagcuguuugcgg

SEQ ID NO: 1069 - RNA, 17 nt, Homo sapiens
ggacgggcugcuccugc

SEQ ID NO: 1070 - RNA, 17 nt, Homo sapiens
cgggcugcuccugcguu

SEQ ID NO: 1071 - RNA, 17 nt, Homo sapiens
ggcugcuccugcguuug

SEQ ID NO: 1072 - RNA, 17 nt, Homo sapiens
gcugcuccugcguuugg

SEQ ID NO: 1073 - RNA, 17 nt, Homo sapiens
augauuucuuguuggug

SEQ ID NO: 1074 - RNA, 17 nt, Homo sapiens
uuggugacaccucaccu

SEQ ID NO: 1075 - RNA, 17 nt, Homo sapiens
ggugacaccucaccuca

SEQ ID NO: 1076 - RNA, 17 nt, Homo sapiens
gugacaccucaccucac

SEQ ID NO: 1077 - RNA, 17 nt, Homo sapiens
gacaccucaccucaccc

SEQ ID NO: 1078 - RNA, 17 nt, Homo sapiens
caccucaccucacccac

SEQ ID NO: 1079 - RNA, 17 nt, Homo sapiens
accucaccucacccacg

SEQ ID NO: 1080 - RNA, 17 nt, Homo sapiens
cucaccucacccacgcg

SEQ ID NO: 1081 - RNA, 17 nt, Homo sapiens
caccucacccacgcgaa

SEQ ID NO: 1082 - RNA, 17 nt, Homo sapiens
accucacccacgcgaaa

SEQ ID NO: 1083 - RNA, 17 nt, Homo sapiens
ccucacccacgcgaaaa

SEQ ID NO: 1084 - RNA, 17 nt, Homo sapiens
gcgaaaaccuuccucag

SEQ ID NO: 1085 - RNA, 17 nt, Homo sapiens
cgaaaaccuuccucagg

SEQ ID NO: 1086 - RNA, 17 nt, Homo sapiens
aaaccuuccucaggacc

SEQ ID NO: 1087 - RNA, 17 nt, Homo sapiens
aaccuuccucaggaccc

SEQ ID NO: 1088 - RNA, 17 nt, Homo sapiens
ccuuccucaggacccug

SEQ ID NO: 1089 - RNA, 17 nt, Homo sapiens
cucaggacccugguccg

SEQ ID NO: 1090 - RNA, 17 nt, Homo sapiens
ucaggacccugguccga

SEQ ID NO: 1091 - RNA, 17 nt, Homo sapiens
caggacccugguccgag

SEQ ID NO: 1092 - RNA, 17 nt, Homo sapiens
cccugguccgagguguc

SEQ ID NO: 1093 - RNA, 17 nt, Homo sapiens
gaggugucccugaguau

SEQ ID NO: 1094 - RNA, 17 nt, Homo sapiens
aggugucccugaguaug

SEQ ID NO: 1095 - RNA, 17 nt, Homo sapiens
ggugucccugaguaugg

SEQ ID NO: 1096 - RNA, 17 nt, Homo sapiens
aguauggcugcguggug

SEQ ID NO: 1097 - RNA, 17 nt, Homo sapiens
uggugaacuugcggaag

SEQ ID NO: 1098 - RNA, 17 nt, Homo sapiens
cggaagacaguggugaa

SEQ ID NO: 1099 - RNA, 17 nt, Homo sapiens
uggugaacuucccugua

SEQ ID NO: 1100 - RNA, 17 nt, Homo sapiens
ugaacuucccuguagaa

SEQ ID NO: 1101 - RNA, 17 nt, Homo sapiens
gaacuucccuguagaag

SEQ ID NO: 1102 - RNA, 17 nt, Homo sapiens
aacuucccuguagaaga

SEQ ID NO: 1103 - RNA, 17 nt, Homo sapiens
gacgaggcccugggugg

SEQ ID NO: 1104 - RNA, 17 nt, Homo sapiens
acgaggcccuggguggc

SEQ ID NO: 1105 - RNA, 17 nt, Homo sapiens
cgaggcccuggguggca

SEQ ID NO: 1106 - RNA, 17 nt, Homo sapiens
uggguggcacggcuuuu

SEQ ID NO: 1107 - RNA, 17 nt, Homo sapiens
ggcacggcuuuuguuca

SEQ ID NO: 1108 - RNA, 17 nt, Homo sapiens
uuuuguucagaugccgg

SEQ ID NO: 1109 - RNA, 17 nt, Homo sapiens
ucagaugccggcccacg

SEQ ID NO: 1110 - RNA, 17 nt, Homo sapiens
augccggcccacggccu

SEQ ID NO: 1111 - RNA, 17 nt, Homo sapiens
ugccggcccacggccua

SEQ ID NO: 1112 - RNA, 17 nt, Homo sapiens
gccggcccacggccuau

SEQ ID NO: 1113 - RNA, 17 nt, Homo sapiens
cccacggccuauucccc

SEQ ID NO: 1114 - RNA, 17 nt, Homo sapiens
ccacggccuauuccccu

SEQ ID NO: 1115 - RNA, 17 nt, Homo sapiens
gccuauuccccuggugc

SEQ ID NO: 1116 - RNA, 17 nt, Homo sapiens
ccuauuccccuggugcg

SEQ ID NO: 1117 - RNA, 17 nt, Homo sapiens
cuauuccccuggugcgg

SEQ ID NO: 1118 - RNA, 17 nt, Homo sapiens
uauuccccuggugcggc

SEQ ID NO: 1119 - RNA, 17 nt, Homo sapiens
ggugcggccugcugcug

SEQ ID NO: 1120 - RNA, 17 nt, Homo sapiens
gugcggccugcugcugg

SEQ ID NO: 1121 - RNA, 17 nt, Homo sapiens
cggccugcugcuggaua

SEQ ID NO: 1122 - RNA, 17 nt, Homo sapiens
ccugcugcuggauaccc

SEQ ID NO: 1123 - RNA, 17 nt, Homo sapiens
cuggauacccggacccu

SEQ ID NO: 1124 - RNA, 17 nt, Homo sapiens
uggauacccggacccug

SEQ ID NO: 1125 - RNA, 17 nt, Homo sapiens
acccggacccuggaggu

SEQ ID NO: 1126 - RNA, 17 nt, Homo sapiens
cccggacccuggaggug

SEQ ID NO: 1127 - RNA, 17 nt, Homo sapiens
ccggacccuggaggugc

SEQ ID NO: 1128 - RNA, 17 nt, Homo sapiens
ggaggugcagagcgacu

SEQ ID NO: 1129 - RNA, 17 nt, Homo sapiens
agagcgacuacuccagc

SEQ ID NO: 1130 - RNA, 17 nt, Homo sapiens
gcgacuacuccagcuau

SEQ ID NO: 1131 - RNA, 17 nt, Homo sapiens
gacuacuccagcuaugc

SEQ ID NO: 1132 - RNA, 17 nt, Homo sapiens
acuacuccagcuaugcc

SEQ ID NO: 1133 - RNA, 17 nt, Homo sapiens
acuccagcuaugcccgg

SEQ ID NO: 1134 - RNA, 17 nt, Homo sapiens
agcuaugcccggaccuc

SEQ ID NO: 1135 - RNA, 17 nt, Homo sapiens
gcuaugcccggaccucc

SEQ ID NO: 1136 - RNA, 17 nt, Homo sapiens
gcccggaccuccaucag

SEQ ID NO: 1137 - RNA, 17 nt, Homo sapiens
cccggaccuccaucaga

SEQ ID NO: 1138 - RNA, 17 nt, Homo sapiens
cggaccuccaucagagc

SEQ ID NO: 1139 - RNA, 17 nt, Homo sapiens
ggaccuccaucagagcc

SEQ ID NO: 1140 - RNA, 17 nt, Homo sapiens
ccuccaucagagccagu

SEQ ID NO: 1141 - RNA, 17 nt, Homo sapiens
aucagagccagucucac

SEQ ID NO: 1142 - RNA, 17 nt, Homo sapiens
ucagagccagucucacc

SEQ ID NO: 1143 - RNA, 17 nt, Homo sapiens
agccagucucaccuuca

SEQ ID NO: 1144 - RNA, 17 nt, Homo sapiens
ccagucucaccuucaac

SEQ ID NO: 1145 - RNA, 17 nt, Homo sapiens
agucucaccuucaaccg

SEQ ID NO: 1146 - RNA, 17 nt, Homo sapiens
gucucaccuucaaccgc

SEQ ID NO: 1147 - RNA, 17 nt, Homo sapiens
ucaccuucaaccgcggc

SEQ ID NO: 1148 - RNA, 17 nt, Homo sapiens
ccuucaaccgcggcuuc

SEQ ID NO: 1149 - RNA, 17 nt, Homo sapiens
accgcggcuucaaggcu

SEQ ID NO: 1150 - RNA, 17 nt, Homo sapiens
gcggcuucaaggcuggg

SEQ ID NO: 1151 - RNA, 17 nt, Homo sapiens
uucaaggcugggaggaa

SEQ ID NO: 1152 - RNA, 17 nt, Homo sapiens
ggaggaacaugcgucgc

SEQ ID NO: 1153 - RNA, 17 nt, Homo sapiens
ugcgucgcaaacucuuu

SEQ ID NO: 1154 - RNA, 17 nt, Homo sapiens
ucgcaaacucuuugggg

SEQ ID NO: 1155 - RNA, 17 nt, Homo sapiens
gcaaacucuuugggguc

SEQ ID NO: 1156 - RNA, 17 nt, Homo sapiens
uuggggucuugcggcug

SEQ ID NO: 1157 - RNA, 17 nt, Homo sapiens
cuugcggcugaaguguc

SEQ ID NO: 1158 - RNA, 17 nt, Homo sapiens
gaagugucacagccugu

SEQ ID NO: 1159 - RNA, 17 nt, Homo sapiens
agugucacagccuguuu

SEQ ID NO: 1160 - RNA, 17 nt, Homo sapiens
gucacagccuguuucug

SEQ ID NO: 1161 - RNA, 17 nt, Homo sapiens
ucacagccuguuucugg

SEQ ID NO: 1162 - RNA, 17 nt, Homo sapiens
ccuguuucuggauuugc

SEQ ID NO: 1163 - RNA, 17 nt, Homo sapiens
ggauuugcaggugaaca

SEQ ID NO: 1164 - RNA, 17 nt, Homo sapiens
aggugaacagccuccag

SEQ ID NO: 1165 - RNA, 17 nt, Homo sapiens
ugaacagccuccagacg

SEQ ID NO: 1166 - RNA, 17 nt, Homo sapiens
gaacagccuccagacgg

SEQ ID NO: 1167 - RNA, 17 nt, Homo sapiens
acagccuccagacggug

SEQ ID NO: 1168 - RNA, 17 nt, Homo sapiens
cagccuccagacggugu

SEQ ID NO: 1169 - RNA, 17 nt, Homo sapiens
cggugugcaccaacauc

SEQ ID NO: 1170 - RNA, 17 nt, Homo sapiens
gugugcaccaacaucua

SEQ ID NO: 1171 - RNA, 17 nt, Homo sapiens
ugugcaccaacaucuac

SEQ ID NO: 1172 - RNA, 17 nt, Homo sapiens
gcaccaacaucuacaag

SEQ ID NO: 1173 - RNA, 17 nt, Homo sapiens
ccaacaucuacaagauc

SEQ ID NO: 1174 - RNA, 17 nt, Homo sapiens
acaucuacaagauccuc

SEQ ID NO: 1175 - RNA, 17 nt, Homo sapiens
acaagauccuccugcug

SEQ ID NO: 1176 - RNA, 17 nt, Homo sapiens
caagauccuccugcugc

SEQ ID NO: 1177 - RNA, 17 nt, Homo sapiens
agauccuccugcugcag

SEQ ID NO: 1178 - RNA, 17 nt, Homo sapiens
gauccuccugcugcagg

SEQ ID NO: 1179 - RNA, 17 nt, Homo sapiens
ccuccugcugcaggcgu

SEQ ID NO: 1180 - RNA, 17 nt, Homo sapiens
ccugcugcaggcguaca

SEQ ID NO: 1181 - RNA, 17 nt, Homo sapiens
aggcguacagguuucac

SEQ ID NO: 1182 - RNA, 17 nt, Homo sapiens
cagguuucacgcaugug

SEQ ID NO: 1183 - RNA, 17 nt, Homo sapiens
uuucacgcaugugugcu

SEQ ID NO: 1184 - RNA, 17 nt, Homo sapiens
augugugcugcagcucc

SEQ ID NO: 1185 - RNA, 17 nt, Homo sapiens
ugugcugcagcucccau

SEQ ID NO: 1186 - RNA, 17 nt, Homo sapiens
gcugcagcucccauuuc

SEQ ID NO: 1187 - RNA, 17 nt, Homo sapiens
ugcagcucccauuucau

SEQ ID NO: 1188 - RNA, 17 nt, Homo sapiens
gcagcucccauuucauc

SEQ ID NO: 1189 - RNA, 17 nt, Homo sapiens
cagcucccauuucauca

SEQ ID NO: 1190 - RNA, 17 nt, Homo sapiens
cccauuucaucagcaag

SEQ ID NO: 1191 - RNA, 17 nt, Homo sapiens
auuucaucagcaaguuu

SEQ ID NO: 1192 - RNA, 17 nt, Homo sapiens
ucaucagcaaguuugga

SEQ ID NO: 1193 - RNA, 17 nt, Homo sapiens
ggaagaaccccacauuu

SEQ ID NO: 1194 - RNA, 17 nt, Homo sapiens
gaagaaccccacauuuu

SEQ ID NO: 1195 - RNA, 17 nt, Homo sapiens
aagaaccccacauuuuu

SEQ ID NO: 1196 - RNA, 17 nt, Homo sapiens
agaaccccacauuuuuc

SEQ ID NO: 1197 - RNA, 17 nt, Homo sapiens
aaccccacauuuuuccu

SEQ ID NO: 1198 - RNA, 17 nt, Homo sapiens
cauuuuuccugcgcguc

SEQ ID NO: 1199 - RNA, 17 nt, Homo sapiens
auuuuuccugcgcguca

SEQ ID NO: 1200 - RNA, 17 nt, Homo sapiens
ugcgcgucaucucugac

SEQ ID NO: 1201 - RNA, 17 nt, Homo sapiens
gcgucaucucugacacg

SEQ ID NO: 1202 - RNA, 17 nt, Homo sapiens
gucaucucugacacggc

SEQ ID NO: 1203 - RNA, 17 nt, Homo sapiens
ucucugacacggccucc

SEQ ID NO: 1204 - RNA, 17 nt, Homo sapiens
gacacggccucccucug

SEQ ID NO: 1205 - RNA, 17 nt, Homo sapiens
acacggccucccucugc

SEQ ID NO: 1206 - RNA, 17 nt, Homo sapiens
acggccucccucugcua

SEQ ID NO: 1207 - RNA, 17 nt, Homo sapiens
cggccucccucugcuac

SEQ ID NO: 1208 - RNA, 17 nt, Homo sapiens
ggccucccucugcuacu

SEQ ID NO: 1209 - RNA, 17 nt, Homo sapiens
ccucccucugcuacucc

SEQ ID NO: 1210 - RNA, 17 nt, Homo sapiens
cccucugcuacuccauc

SEQ ID NO: 1211 - RNA, 17 nt, Homo sapiens
ucugcuacuccauccug

SEQ ID NO: 1212 - RNA, 17 nt, Homo sapiens
ugcuacuccauccugaa

SEQ ID NO: 1213 - RNA, 17 nt, Homo sapiens
gcuacuccauccugaaa

SEQ ID NO: 1214 - RNA, 17 nt, Homo sapiens
acuccauccugaaagcc

SEQ ID NO: 1215 - RNA, 17 nt, Homo sapiens
cuccauccugaaagcca

SEQ ID NO: 1216 - RNA, 17 nt, Homo sapiens
cugaaagccaagaacgc

SEQ ID NO: 1217 - RNA, 17 nt, Homo sapiens
ugaaagccaagaacgca

SEQ ID NO: 1218 - RNA, 17 nt, Homo sapiens
aagaacgcagggauguc

SEQ ID NO: 1219 - RNA, 17 nt, Homo sapiens
gaugucgcugggggcca

SEQ ID NO: 1220 - RNA, 17 nt, Homo sapiens
cugggggccaagggcgc

SEQ ID NO: 1221 - RNA, 17 nt, Homo sapiens
ugggggccaagggcgcc

SEQ ID NO: 1222 - RNA, 17 nt, Homo sapiens
aagggcgccgccggccc

SEQ ID NO: 1223 - RNA, 17 nt, Homo sapiens
ggcgccgccggcccucu

SEQ ID NO: 1224 - RNA, 17 nt, Homo sapiens
ccgccggcccucugccc

SEQ ID NO: 1225 - RNA, 17 nt, Homo sapiens
cgccggcccucugcccu

SEQ ID NO: 1226 - RNA, 17 nt, Homo sapiens
gccggcccucugcccuc

SEQ ID NO: 1227 - RNA, 17 nt, Homo sapiens
cggcccucugcccuccg

SEQ ID NO: 1228 - RNA, 17 nt, Homo sapiens
cccucugcccuccgagg

SEQ ID NO: 1229 - RNA, 17 nt, Homo sapiens
ccucugcccuccgaggc

SEQ ID NO: 1230 - RNA, 17 nt, Homo sapiens
cucugcccuccgaggcc

SEQ ID NO: 1231 - RNA, 17 nt, Homo sapiens
cugcccuccgaggccgu

SEQ ID NO: 1232 - RNA, 17 nt, Homo sapiens
uccgaggccgugcagug

SEQ ID NO: 1233 - RNA, 17 nt, Homo sapiens
ggccgugcaguggcugu

SEQ ID NO: 1234 - RNA, 17 nt, Homo sapiens
gcaguggcugugccacc

SEQ ID NO: 1235 - RNA, 17 nt, Homo sapiens
ggcugugccaccaagca

SEQ ID NO: 1236 - RNA, 17 nt, Homo sapiens
gcugugccaccaagcau

SEQ ID NO: 1237 - RNA, 17 nt, Homo sapiens
ugugccaccaagcauuc

SEQ ID NO: 1238 - RNA, 17 nt, Homo sapiens
gugccaccaagcauucc

SEQ ID NO: 1239 - RNA, 17 nt, Homo sapiens
caccaagcauuccugcu

SEQ ID NO: 1240 - RNA, 17 nt, Homo sapiens
aagcauuccugcucaag

SEQ ID NO: 1241 - RNA, 17 nt, Homo sapiens
agcauuccugcucaagc

SEQ ID NO: 1242 - RNA, 17 nt, Homo sapiens
auuccugcucaagcuga

SEQ ID NO: 1243 - RNA, 17 nt, Homo sapiens
uccugcucaagcugacu

SEQ ID NO: 1244 - RNA, 17 nt, Homo sapiens
gcucaagcugacucgac

SEQ ID NO: 1245 - RNA, 17 nt, Homo sapiens
aagcugacucgacaccg

SEQ ID NO: 1246 - RNA, 17 nt, Homo sapiens
gacucgacaccguguca

SEQ ID NO: 1247 - RNA, 17 nt, Homo sapiens
cucgacaccgugucacc

SEQ ID NO: 1248 - RNA, 17 nt, Homo sapiens
accgugucaccuacgug

SEQ ID NO: 1249 - RNA, 17 nt, Homo sapiens
cgugucaccuacgugcc

SEQ ID NO: 1250 - RNA, 17 nt, Homo sapiens
gugucaccuacgugcca

SEQ ID NO: 1251 - RNA, 17 nt, Homo sapiens
cuacgugccacuccugg

SEQ ID NO: 1252 - RNA, 17 nt, Homo sapiens
uacgugccacuccuggg

SEQ ID NO: 1253 - RNA, 17 nt, Homo sapiens
cgugccacuccuggggu

SEQ ID NO: 1254 - RNA, 17 nt, Homo sapiens
ugccacuccugggguca

SEQ ID NO: 1255 - RNA, 17 nt, Homo sapiens
gccacuccuggggucac

SEQ ID NO: 1256 - RNA, 17 nt, Homo sapiens
cuggggucacucaggac

SEQ ID NO: 1257 - RNA, 17 nt, Homo sapiens
ggggucacucaggacag

SEQ ID NO: 1258 - RNA, 17 nt, Homo sapiens
ggucacucaggacagcc

SEQ ID NO: 1259 - RNA, 17 nt, Homo sapiens
cucaggacagcccagac

SEQ ID NO: 1260 - RNA, 17 nt, Homo sapiens
aggacagcccagacgca

SEQ ID NO: 1261 - RNA, 17 nt, Homo sapiens
ggacagcccagacgcag

SEQ ID NO: 1262 - RNA, 17 nt, Homo sapiens
gacagcccagacgcagc

SEQ ID NO: 1263 - RNA, 17 nt, Homo sapiens
ccagacgcagcugaguc

SEQ ID NO: 1264 - RNA, 17 nt, Homo sapiens
gacgcagcugagucgga

SEQ ID NO: 1265 - RNA, 17 nt, Homo sapiens
ucggaagcucccgggga

SEQ ID NO: 1266 - RNA, 17 nt, Homo sapiens
ggaagcucccggggacg

SEQ ID NO: 1267 - RNA, 17 nt, Homo sapiens
gaagcucccggggacga

SEQ ID NO: 1268 - RNA, 17 nt, Homo sapiens
gacgacgcugacugccc

SEQ ID NO: 1269 - RNA, 17 nt, Homo sapiens
acgcugacugcccugga

SEQ ID NO: 1270 - RNA, 17 nt, Homo sapiens
cugacugcccuggaggc

SEQ ID NO: 1271 - RNA, 17 nt, Homo sapiens
ugacugcccuggaggcc

SEQ ID NO: 1272 - RNA, 17 nt, Homo sapiens
gacugcccuggaggccg

SEQ ID NO: 1273 - RNA, 17 nt, Homo sapiens
cuggaggccgcagccaa

SEQ ID NO: 1274 - RNA, 17 nt, Homo sapiens
gaggccgcagccaaccc

SEQ ID NO: 1275 - RNA, 17 nt, Homo sapiens
gccgcagccaacccggc

SEQ ID NO: 1276 - RNA, 17 nt, Homo sapiens
ccgcagccaacccggca

SEQ ID NO: 1277 - RNA, 17 nt, Homo sapiens
cagccaacccggcacug

SEQ ID NO: 1278 - RNA, 17 nt, Homo sapiens
agccaacccggcacugc

SEQ ID NO: 1279 - RNA, 17 nt, Homo sapiens
aacccggcacugcccuc

SEQ ID NO: 1280 - RNA, 17 nt, Homo sapiens
cccggcacugcccucag

SEQ ID NO: 1281 - RNA, 17 nt, Homo sapiens
ggcacugcccucagacu

SEQ ID NO: 1282 - RNA, 17 nt, Homo sapiens
gcacugcccucagacuu

SEQ ID NO: 1283 - RNA, 17 nt, Homo sapiens
cacugcccucagacuuc

SEQ ID NO: 1284 - RNA, 17 nt, Homo sapiens
cugcccucagacuucaa

SEQ ID NO: 1285 - RNA, 17 nt, Homo sapiens
ccucagacuucaagacc

SEQ ID NO: 1286 - RNA, 17 nt, Homo sapiens
cagacuucaagaccauc

SEQ ID NO: 1287 - RNA, 17 nt, Homo sapiens
uucaagaccauccugga

SEQ ID NO: 1288 - RNA, 17 nt, Homo sapiens
ucaagaccauccuggac

SEQ ID NO: 1289 - RNA, 17 nt, Homo sapiens
agaccauccuggacuga

SEQ ID NO: 1290 - RNA, 17 nt, Homo sapiens
gaccauccuggacugau

SEQ ID NO: 1291 - RNA, 17 nt, Homo sapiens
uccuggacugauggcca

SEQ ID NO: 1292 - RNA, 17 nt, Homo sapiens
cugauggccacccgccc

SEQ ID NO: 1293 - RNA, 17 nt, Homo sapiens
ugauggccacccgccca

SEQ ID NO: 1294 - RNA, 17 nt, Homo sapiens
auggccacccgcccaca

SEQ ID NO: 1295 - RNA, 17 nt, Homo sapiens
uggccacccgcccacag

SEQ ID NO: 1296 - RNA, 17 nt, Homo sapiens
ccacccgcccacagcca

SEQ ID NO: 1297 - RNA, 17 nt, Homo sapiens
cacccgcccacagccag

SEQ ID NO: 1298 - RNA, 17 nt, Homo sapiens
acccgcccacagccagg

SEQ ID NO: 1299 - RNA, 17 nt, Homo sapiens
ccgcccacagccaggcc

SEQ ID NO: 1300 - RNA, 17 nt, Homo sapiens
cccacagccaggccgag

SEQ ID NO: 1301 - RNA, 17 nt, Homo sapiens
ccacagccaggccgaga

SEQ ID NO: 1302 - RNA, 17 nt, Homo sapiens
agccaggccgagagcag

SEQ ID NO: 1303 - RNA, 17 nt, Homo sapiens
ccgagagcagacaccag

SEQ ID NO: 1304 - RNA, 17 nt, Homo sapiens
gagcagacaccagcagc

SEQ ID NO: 1305 - RNA, 17 nt, Homo sapiens
gcagacaccagcagccc

SEQ ID NO: 1306 - RNA, 17 nt, Homo sapiens
cagacaccagcagcccu

SEQ ID NO: 1307 - RNA, 17 nt, Homo sapiens
acaccagcagcccuguc

SEQ ID NO: 1308 - RNA, 17 nt, Homo sapiens
ccagcagcccugucacg

SEQ ID NO: 1309 - RNA, 17 nt, Homo sapiens
cagcagcccugucacgc

SEQ ID NO: 1310 - RNA, 17 nt, Homo sapiens
agcagcccugucacgcc

SEQ ID NO: 1311 - RNA, 17 nt, Homo sapiens
gcccugucacgccgggc

SEQ ID NO: 1312 - RNA, 17 nt, Homo sapiens
ugucacgccgggcucua

SEQ ID NO: 1313 - RNA, 17 nt, Homo sapiens
cgccgggcucuacgucc

SEQ ID NO: 1314 - RNA, 17 nt, Homo sapiens
ccgggcucuacguccca

SEQ ID NO: 1315 - RNA, 17 nt, Homo sapiens
ucuacgucccagggagg

SEQ ID NO: 1316 - RNA, 17 nt, Homo sapiens
cuacgucccagggaggg

SEQ ID NO: 1317 - RNA, 17 nt, Homo sapiens
uacgucccagggaggga

SEQ ID NO: 1318 - RNA, 17 nt, Homo sapiens
ggggcggcccacaccca

SEQ ID NO: 1319 - RNA, 17 nt, Homo sapiens
gggcggcccacacccag

SEQ ID NO: 1320 - RNA, 17 nt, Homo sapiens
ggcggcccacacccagg

SEQ ID NO: 1321 - RNA, 17 nt, Homo sapiens
cggcccacacccaggcc

SEQ ID NO: 1322 - RNA, 17 nt, Homo sapiens
gcccacacccaggcccg

SEQ ID NO: 1323 - RNA, 17 nt, Homo sapiens
cccacacccaggcccgc

SEQ ID NO: 1324 - RNA, 17 nt, Homo sapiens
ccacacccaggcccgca

SEQ ID NO: 1325 - RNA, 17 nt, Homo sapiens
acccaggcccgcaccgc

SEQ ID NO: 1326 - RNA, 17 nt, Homo sapiens
cccaggcccgcaccgcu

SEQ ID NO: 1327 - RNA, 17 nt, Homo sapiens
aggcccgcaccgcuggg

SEQ ID NO: 1328 - RNA, 17 nt, Homo sapiens
gcccgcaccgcugggag

SEQ ID NO: 1329 - RNA, 17 nt, Homo sapiens
cgcaccgcugggagucu

SEQ ID NO: 1330 - RNA, 17 nt, Homo sapiens
ugggagucugaggccug

SEQ ID NO: 1331 - RNA, 17 nt, Homo sapiens
ucugaggccugagugag

SEQ ID NO: 1332 - RNA, 17 nt, Homo sapiens
cugaggccugagugagu

SEQ ID NO: 1333 - RNA, 17 nt, Homo sapiens
uguuuggccgaggccug

SEQ ID NO: 1334 - RNA, 17 nt, Homo sapiens
gccgaggccugcauguc

SEQ ID NO: 1335 - RNA, 17 nt, Homo sapiens
ccgaggccugcaugucc

SEQ ID NO: 1336 - RNA, 17 nt, Homo sapiens
aggccugcauguccggc

SEQ ID NO: 1337 - RNA, 17 nt, Homo sapiens
ugcauguccggcugaag

SEQ ID NO: 1338 - RNA, 17 nt, Homo sapiens
uguccggcugaaggcug

SEQ ID NO: 1339 - RNA, 17 nt, Homo sapiens
cugaaggcugagugucc

SEQ ID NO: 1340 - RNA, 17 nt, Homo sapiens
ugaguguccggcugagg

SEQ ID NO: 1341 - RNA, 17 nt, Homo sapiens
uguccggcugaggccug

SEQ ID NO: 1342 - RNA, 17 nt, Homo sapiens
gcugaggccugagcgag

SEQ ID NO: 1343 - RNA, 17 nt, Homo sapiens
cugaggccugagcgagu

SEQ ID NO: 1344 - RNA, 17 nt, Homo sapiens
cgaguguccagccaagg

SEQ ID NO: 1345 - RNA, 17 nt, Homo sapiens
gaguguccagccaaggg

SEQ ID NO: 1346 - RNA, 17 nt, Homo sapiens
uguccagccaagggcug

SEQ ID NO: 1347 - RNA, 17 nt, Homo sapiens
guccagccaagggcuga

SEQ ID NO: 1348 - RNA, 17 nt, Homo sapiens
ccaagggcugagugucc

SEQ ID NO: 1349 - RNA, 17 nt, Homo sapiens
ugaguguccagcacacc

SEQ ID NO: 1350 - RNA, 17 nt, Homo sapiens
gaguguccagcacaccu

SEQ ID NO: 1351 - RNA, 17 nt, Homo sapiens
uguccagcacaccugcc

SEQ ID NO: 1352 - RNA, 17 nt, Homo sapiens
uccagcacaccugccgu

SEQ ID NO: 1353 - RNA, 17 nt, Homo sapiens
cagcacaccugccgucu

SEQ ID NO: 1354 - RNA, 17 nt, Homo sapiens
agcacaccugccgucuu

SEQ ID NO: 1355 - RNA, 17 nt, Homo sapiens
acaccugccgucuucac

SEQ ID NO: 1356 - RNA, 17 nt, Homo sapiens
cugccgucuucacuucc

SEQ ID NO: 1357 - RNA, 17 nt, Homo sapiens
ccgucuucacuucccca

SEQ ID NO: 1358 - RNA, 17 nt, Homo sapiens
gucuucacuuccccaca

SEQ ID NO: 1359 - RNA, 17 nt, Homo sapiens
uucacuuccccacaggc

SEQ ID NO: 1360 - RNA, 17 nt, Homo sapiens
ucacuuccccacaggcu

SEQ ID NO: 1361 - RNA, 17 nt, Homo sapiens
cacuuccccacaggcug

SEQ ID NO: 1362 - RNA, 17 nt, Homo sapiens
acuuccccacaggcugg

SEQ ID NO: 1363 - RNA, 17 nt, Homo sapiens
uuccccacaggcuggcg

SEQ ID NO: 1364 - RNA, 17 nt, Homo sapiens
ccacaggcuggcgcucg

SEQ ID NO: 1365 - RNA, 17 nt, Homo sapiens
gcuggcgcucggcucca

SEQ ID NO: 1366 - RNA, 17 nt, Homo sapiens
cgcucggcuccacccca

SEQ ID NO: 1367 - RNA, 17 nt, Homo sapiens
cucggcuccaccccagg

SEQ ID NO: 1368 - RNA, 17 nt, Homo sapiens
ucggcuccaccccaggg

SEQ ID NO: 1369 - RNA, 17 nt, Homo sapiens
ggcuccaccccagggcc

SEQ ID NO: 1370 - RNA, 17 nt, Homo sapiens
gcuccaccccagggcca

SEQ ID NO: 1371 - RNA, 17 nt, Homo sapiens
cuccaccccagggccag

SEQ ID NO: 1372 - RNA, 17 nt, Homo sapiens
uccaccccagggccagc

SEQ ID NO: 1373 - RNA, 17 nt, Homo sapiens
cccagggccagcuuuuc

SEQ ID NO: 1374 - RNA, 17 nt, Homo sapiens
ccagggccagcuuuucc

SEQ ID NO: 1375 - RNA, 17 nt, Homo sapiens
gggccagcuuuuccuca

SEQ ID NO: 1376 - RNA, 17 nt, Homo sapiens
agcuuuuccucaccagg

SEQ ID NO: 1377 - RNA, 17 nt, Homo sapiens
gcuuuuccucaccagga

SEQ ID NO: 1378 - RNA, 17 nt, Homo sapiens
uuuuccucaccaggagc

SEQ ID NO: 1379 - RNA, 17 nt, Homo sapiens
uuccucaccaggagccc

SEQ ID NO: 1380 - RNA, 17 nt, Homo sapiens
uccucaccaggagcccg

SEQ ID NO: 1381 - RNA, 17 nt, Homo sapiens
ccaggagcccggcuucc

SEQ ID NO: 1382 - RNA, 17 nt, Homo sapiens
caggagcccggcuucca

SEQ ID NO: 1383 - RNA, 17 nt, Homo sapiens
agcccggcuuccacucc

SEQ ID NO: 1384 - RNA, 17 nt, Homo sapiens
ccggcuuccacucccca

SEQ ID NO: 1385 - RNA, 17 nt, Homo sapiens
cggcuuccacuccccac

SEQ ID NO: 1386 - RNA, 17 nt, Homo sapiens
gcuuccacuccccacau

SEQ ID NO: 1387 - RNA, 17 nt, Homo sapiens
uuccacuccccacauag

SEQ ID NO: 1388 - RNA, 17 nt, Homo sapiens
uccacuccccacauagg

SEQ ID NO: 1389 - RNA, 17 nt, Homo sapiens
ccacuccccacauagga

SEQ ID NO: 1390 - RNA, 17 nt, Homo sapiens
cacuccccacauaggaa

SEQ ID NO: 1391 - RNA, 17 nt, Homo sapiens
cuccccacauaggaaua

SEQ ID NO: 1392 - RNA, 17 nt, Homo sapiens
gaauaguccauccccag

SEQ ID NO: 1393 - RNA, 17 nt, Homo sapiens
aauaguccauccccaga

SEQ ID NO: 1394 - RNA, 17 nt, Homo sapiens
aguccauccccagauuc

SEQ ID NO: 1395 - RNA, 17 nt, Homo sapiens
guccauccccagauucg

SEQ ID NO: 1396 - RNA, 17 nt, Homo sapiens
uccauccccagauucgc

SEQ ID NO: 1397 - RNA, 17 nt, Homo sapiens
ccauccccagauucgcc

SEQ ID NO: 1398 - RNA, 17 nt, Homo sapiens
agauucgccauuguuca

SEQ ID NO: 1399 - RNA, 17 nt, Homo sapiens
gauucgccauuguucac

SEQ ID NO: 1400 - RNA, 17 nt, Homo sapiens
cauuguucaccccucgc

SEQ ID NO: 1401 - RNA, 17 nt, Homo sapiens
uuguucaccccucgccc

SEQ ID NO: 1402 - RNA, 17 nt, Homo sapiens
uguucaccccucgcccu

SEQ ID NO: 1403 - RNA, 17 nt, Homo sapiens
guucaccccucgcccug

SEQ ID NO: 1404 - RNA, 17 nt, Homo sapiens
uucaccccucgcccugc

SEQ ID NO: 1405 - RNA, 17 nt, Homo sapiens
ccccucgcccugcccuc

SEQ ID NO: 1406 - RNA, 17 nt, Homo sapiens
cccucgcccugcccucc

SEQ ID NO: 1407 - RNA, 17 nt, Homo sapiens
ccucgcccugcccuccu

SEQ ID NO: 1408 - RNA, 17 nt, Homo sapiens
cgcccugcccuccuuug

SEQ ID NO: 1409 - RNA, 17 nt, Homo sapiens
gcccugcccuccuuugc

SEQ ID NO: 1410 - RNA, 17 nt, Homo sapiens
cccugcccuccuuugcc

SEQ ID NO: 1411 - RNA, 17 nt, Homo sapiens
cugcccuccuuugccuu

SEQ ID NO: 1412 - RNA, 17 nt, Homo sapiens
ugcccuccuuugccuuc

SEQ ID NO: 1413 - RNA, 17 nt, Homo sapiens
uccuuugccuuccaccc

SEQ ID NO: 1414 - RNA, 17 nt, Homo sapiens
ccuuugccuuccacccc

SEQ ID NO: 1415 - RNA, 17 nt, Homo sapiens
uugccuuccacccccac

SEQ ID NO: 1416 - RNA, 17 nt, Homo sapiens
ugccuuccacccccacc

SEQ ID NO: 1417 - RNA, 17 nt, Homo sapiens
ccuuccacccccaccau

SEQ ID NO: 1418 - RNA, 17 nt, Homo sapiens
cuuccacccccaccauc

SEQ ID NO: 1419 - RNA, 17 nt, Homo sapiens
uuccacccccaccaucc

SEQ ID NO: 1420 - RNA, 17 nt, Homo sapiens
uccacccccaccaucca

SEQ ID NO: 1421 - RNA, 17 nt, Homo sapiens
ccacccccaccauccag

SEQ ID NO: 1422 - RNA, 17 nt, Homo sapiens
acccccaccauccaggu

SEQ ID NO: 1423 - RNA, 17 nt, Homo sapiens
cccccaccauccaggug

SEQ ID NO: 1424 - RNA, 17 nt, Homo sapiens
ccaccauccagguggag

SEQ ID NO: 1425 - RNA, 17 nt, Homo sapiens
caccauccagguggaga

SEQ ID NO: 1426 - RNA, 17 nt, Homo sapiens
guggagacccugagaag

SEQ ID NO: 1427 - RNA, 17 nt, Homo sapiens
uggagacccugagaagg

SEQ ID NO: 1428 - RNA, 17 nt, Homo sapiens
ggagacccugagaagga

SEQ ID NO: 1429 - RNA, 17 nt, Homo sapiens
agaaggacccugggagc

SEQ ID NO: 1430 - RNA, 17 nt, Homo sapiens
gaaggacccugggagcu

SEQ ID NO: 1431 - RNA, 17 nt, Homo sapiens
aaggacccugggagcuc

SEQ ID NO: 1432 - RNA, 17 nt, Homo sapiens
cugggagcucugggaau

SEQ ID NO: 1433 - RNA, 17 nt, Homo sapiens
gggagcucugggaauuu

SEQ ID NO: 1434 - RNA, 17 nt, Homo sapiens
ggagugaccaaaggugu

SEQ ID NO: 1435 - RNA, 17 nt, Homo sapiens
gagugaccaaaggugug

SEQ ID NO: 1436 - RNA, 17 nt, Homo sapiens
aggugugcccuguacac

SEQ ID NO: 1437 - RNA, 17 nt, Homo sapiens
ggugugcccuguacaca

SEQ ID NO: 1438 - RNA, 17 nt, Homo sapiens
gugugcccuguacacag

SEQ ID NO: 1439 - RNA, 17 nt, Homo sapiens
cccuguacacaggcgag

SEQ ID NO: 1440 - RNA, 17 nt, Homo sapiens
cuguacacaggcgagga

SEQ ID NO: 1441 - RNA, 17 nt, Homo sapiens
gcgaggacccugcaccu

SEQ ID NO: 1442 - RNA, 17 nt, Homo sapiens
cgaggacccugcaccug

SEQ ID NO: 1443 - RNA, 17 nt, Homo sapiens
gaggacccugcaccugg

SEQ ID NO: 1444 - RNA, 17 nt, Homo sapiens
gacccugcaccuggaug

SEQ ID NO: 1445 - RNA, 17 nt, Homo sapiens
cccugcaccuggauggg

SEQ ID NO: 1446 - RNA, 17 nt, Homo sapiens
ccugcaccuggaugggg

SEQ ID NO: 1447 - RNA, 17 nt, Homo sapiens
ugggggucccugugggu

SEQ ID NO: 1448 - RNA, 17 nt, Homo sapiens
gggggucccuguggguc

SEQ ID NO: 1449 - RNA, 17 nt, Homo sapiens
ggggucccuguggguca

SEQ ID NO: 1450 - RNA, 17 nt, Homo sapiens
ugugggucaaauugggg

SEQ ID NO: 1451 - RNA, 17 nt, Homo sapiens
ggaggugcugugggagu

SEQ ID NO: 1452 - RNA, 17 nt, Homo sapiens
uaaaauacugaauauau

SEQ ID NO: 1453 - RNA, 17 nt, Homo sapiens
aguuuuucaguuuugaa

SEQ ID NO: 1454 - RNA, 16 nt, Homo sapiens
gcugcguccugcugcg

SEQ ID NO: 1455 - RNA, 16 nt, Homo sapiens
gcguccugcugcgcac

SEQ ID NO: 1456 - RNA, 16 nt, Homo sapiens
guccugcugcgcacgu

SEQ ID NO: 1457 - RNA, 16 nt, Homo sapiens
ggccacccccgcgaug

SEQ ID NO: 1458 - RNA, 16 nt, Homo sapiens
ccacccccgcgaugcc

SEQ ID NO: 1459 - RNA, 16 nt, Homo sapiens
cccccgcgaugccgcg

SEQ ID NO: 1460 - RNA, 16 nt, Homo sapiens
ccgcgaugccgcgcgc

SEQ ID NO: 1461 - RNA, 16 nt, Homo sapiens
gcgaugccgcgcgcuc

SEQ ID NO: 1462 - RNA, 16 nt, Homo sapiens
gaugccgcgcgcuccc

SEQ ID NO: 1463 - RNA, 16 nt, Homo sapiens
cgcgcuccccgcugcc

SEQ ID NO: 1464 - RNA, 16 nt, Homo sapiens
gcuccccgcugccgag

SEQ ID NO: 1465 - RNA, 16 nt, Homo sapiens
ccccgcugccgagccg

SEQ ID NO: 1466 - RNA, 16 nt, Homo sapiens
gccgagccgugcgcuc

SEQ ID NO: 1467 - RNA, 16 nt, Homo sapiens
cgagccgugcgcuccc

SEQ ID NO: 1468 - RNA, 16 nt, Homo sapiens
ugcgcucccugcugcg

SEQ ID NO: 1469 - RNA, 16 nt, Homo sapiens
gcucccugcugcgcag

SEQ ID NO: 1470 - RNA, 16 nt, Homo sapiens
ucccugcugcgcagcc

SEQ ID NO: 1471 - RNA, 16 nt, Homo sapiens
agccacuaccgcgagg

SEQ ID NO: 1472 - RNA, 16 nt, Homo sapiens
ccacuaccgcgaggug

SEQ ID NO: 1473 - RNA, 16 nt, Homo sapiens
accgcgaggugcugcc

SEQ ID NO: 1474 - RNA, 16 nt, Homo sapiens
gcgaggugcugccgcu

SEQ ID NO: 1475 - RNA, 16 nt, Homo sapiens
aggugcugccgcuggc

SEQ ID NO: 1476 - RNA, 16 nt, Homo sapiens
ccacguucgugcggcg

SEQ ID NO: 1477 - RNA, 16 nt, Homo sapiens
uucgugcggcgccugg

SEQ ID NO: 1478 - RNA, 16 nt, Homo sapiens
ggcggcuggugcagcg

SEQ ID NO: 1479 - RNA, 16 nt, Homo sapiens
cuggugcagcgcgggg

SEQ ID NO: 1480 - RNA, 16 nt, Homo sapiens
gcggcuuuccgcgcgc

SEQ ID NO: 1481 - RNA, 16 nt, Homo sapiens
ggcuuuccgcgcgcug

SEQ ID NO: 1482 - RNA, 16 nt, Homo sapiens
cuuuccgcgcgcuggu

SEQ ID NO: 1483 - RNA, 16 nt, Homo sapiens
guggcccagugccugg

SEQ ID NO: 1484 - RNA, 16 nt, Homo sapiens
agugccuggugugcgu

SEQ ID NO: 1485 - RNA, 16 nt, Homo sapiens
ugccuggugugcgugc

SEQ ID NO: 1486 - RNA, 16 nt, Homo sapiens
uggugugcgugcccug

SEQ ID NO: 1487 - RNA, 16 nt, Homo sapiens
gcccugggacgcacgg

SEQ ID NO: 1488 - RNA, 16 nt, Homo sapiens
acgcacggccgccccc

SEQ ID NO: 1489 - RNA, 16 nt, Homo sapiens
gccgccccccgccgcc

SEQ ID NO: 1490 - RNA, 16 nt, Homo sapiens
gccccccgccgccccc

SEQ ID NO: 1491 - RNA, 16 nt, Homo sapiens
cccuccuuccgccagg

SEQ ID NO: 1492 - RNA, 16 nt, Homo sapiens
uccgccagguguccug

SEQ ID NO: 1493 - RNA, 16 nt, Homo sapiens
cagguguccugccuga

SEQ ID NO: 1494 - RNA, 16 nt, Homo sapiens
uguccugccugaagga

SEQ ID NO: 1495 - RNA, 16 nt, Homo sapiens
cugguggcccgagugc

SEQ ID NO: 1496 - RNA, 16 nt, Homo sapiens
uggcccgagugcugca

SEQ ID NO: 1497 - RNA, 16 nt, Homo sapiens
cccgagugcugcagag

SEQ ID NO: 1498 - RNA, 16 nt, Homo sapiens
ugcagaggcugugcga

SEQ ID NO: 1499 - RNA, 16 nt, Homo sapiens
cagaggcugugcgagc

SEQ ID NO: 1500 - RNA, 16 nt, Homo sapiens
gaggcugugcgagcgc

SEQ ID NO: 1501 - RNA, 16 nt, Homo sapiens
cugugcgagcgcggcg

SEQ ID NO: 1502 - RNA, 16 nt, Homo sapiens
cgagcgcggcgcgaag

SEQ ID NO: 1503 - RNA, 16 nt, Homo sapiens
agcgcggcgcgaagaa

SEQ ID NO: 1504 - RNA, 16 nt, Homo sapiens
cgaagaacgugcuggc

SEQ ID NO: 1505 - RNA, 16 nt, Homo sapiens
cuucggcuucgcgcug

SEQ ID NO: 1506 - RNA, 16 nt, Homo sapiens
ucggcuucgcgcugcu

SEQ ID NO: 1507 - RNA, 16 nt, Homo sapiens
gcuucgcgcugcugga

SEQ ID NO: 1508 - RNA, 16 nt, Homo sapiens
gacggggcccgcgggg

SEQ ID NO: 1509 - RNA, 16 nt, Homo sapiens
gggcccccccgaggcc

SEQ ID NO: 1510 - RNA, 16 nt, Homo sapiens
ccaccagcgugcgcag

SEQ ID NO: 1511 - RNA, 16 nt, Homo sapiens
accagcgugcgcagcu

SEQ ID NO: 1512 - RNA, 16 nt, Homo sapiens
gcagcuaccugcccaa

SEQ ID NO: 1513 - RNA, 16 nt, Homo sapiens
ccaacacggugaccga

SEQ ID NO: 1514 - RNA, 16 nt, Homo sapiens
cacggugaccgacgca

SEQ ID NO: 1515 - RNA, 16 nt, Homo sapiens
ggugaccgacgcacug

SEQ ID NO: 1516 - RNA, 16 nt, Homo sapiens
ccgacgcacugcgggg

SEQ ID NO: 1517 - RNA, 16 nt, Homo sapiens
cgugggggcugcugcu

SEQ ID NO: 1518 - RNA, 16 nt, Homo sapiens
gggggcugcugcugcg

SEQ ID NO: 1519 - RNA, 16 nt, Homo sapiens
ggcugcugcugcgccg

SEQ ID NO: 1520 - RNA, 16 nt, Homo sapiens
cugcugcugcgccgcg

SEQ ID NO: 1521 - RNA, 16 nt, Homo sapiens
cugcugcgccgcgugg

SEQ ID NO: 1522 - RNA, 16 nt, Homo sapiens
ccgcgugggcgacgac

SEQ ID NO: 1523 - RNA, 16 nt, Homo sapiens
cgugggcgacgacgug

SEQ ID NO: 1524 - RNA, 16 nt, Homo sapiens
gcgacgacgugcuggu

SEQ ID NO: 1525 - RNA, 16 nt, Homo sapiens
ugguucaccugcuggc

SEQ ID NO: 1526 - RNA, 16 nt, Homo sapiens
cugcuggcacgcugcg

SEQ ID NO: 1527 - RNA, 16 nt, Homo sapiens
cuggcacgcugcgcgc

SEQ ID NO: 1528 - RNA, 16 nt, Homo sapiens
ggcacgcugcgcgcuc

SEQ ID NO: 1529 - RNA, 16 nt, Homo sapiens
cacgcugcgcgcucuu

SEQ ID NO: 1530 - RNA, 16 nt, Homo sapiens
cgcgcucuuugugcug

SEQ ID NO: 1531 - RNA, 16 nt, Homo sapiens
cgcucuuugugcuggu

SEQ ID NO: 1532 - RNA, 16 nt, Homo sapiens
gcucccagcugcgccu

SEQ ID NO: 1533 - RNA, 16 nt, Homo sapiens
ucccagcugcgccuac

SEQ ID NO: 1534 - RNA, 16 nt, Homo sapiens
ccuaccaggugugcgg

SEQ ID NO: 1535 - RNA, 16 nt, Homo sapiens
uaccaggugugcgggc

SEQ ID NO: 1536 - RNA, 16 nt, Homo sapiens
ugugcgggccgccgcu

SEQ ID NO: 1537 - RNA, 16 nt, Homo sapiens
gcgggccgccgcugua

SEQ ID NO: 1538 - RNA, 16 nt, Homo sapiens
ggccgccgcuguacca

SEQ ID NO: 1539 - RNA, 16 nt, Homo sapiens
ccagcucggcgcugcc

SEQ ID NO: 1540 - RNA, 16 nt, Homo sapiens
gcucggcgcugccacu

SEQ ID NO: 1541 - RNA, 16 nt, Homo sapiens
cccggcccccgccaca

SEQ ID NO: 1542 - RNA, 16 nt, Homo sapiens
cccgccacacgcuagu

SEQ ID NO: 1543 - RNA, 16 nt, Homo sapiens
aguggaccccgaaggc

SEQ ID NO: 1544 - RNA, 16 nt, Homo sapiens
cgucugggaugcgaac

SEQ ID NO: 1545 - RNA, 16 nt, Homo sapiens
ucugggaugcgaacgg

SEQ ID NO: 1546 - RNA, 16 nt, Homo sapiens
cccugggccugccagc

SEQ ID NO: 1547 - RNA, 16 nt, Homo sapiens
agccccgggugcgagg

SEQ ID NO: 1548 - RNA, 16 nt, Homo sapiens
ccccgggugcgaggag

SEQ ID NO: 1549 - RNA, 16 nt, Homo sapiens
gcgaggaggcgcgggg

SEQ ID NO: 1550 - RNA, 16 nt, Homo sapiens
cgggggcagugccagc

SEQ ID NO: 1551 - RNA, 16 nt, Homo sapiens
agugccagccgaaguc

SEQ ID NO: 1552 - RNA, 16 nt, Homo sapiens
gccgaagucugccguu

SEQ ID NO: 1553 - RNA, 16 nt, Homo sapiens
gucugccguugcccaa

SEQ ID NO: 1554 - RNA, 16 nt, Homo sapiens
caggcguggcgcugcc

SEQ ID NO: 1555 - RNA, 16 nt, Homo sapiens
gcguggcgcugccccu

SEQ ID NO: 1556 - RNA, 16 nt, Homo sapiens
cgcugccccugagccg

SEQ ID NO: 1557 - RNA, 16 nt, Homo sapiens
cggagcggacgcccgu

SEQ ID NO: 1558 - RNA, 16 nt, Homo sapiens
cgggcaggacgcgugg

SEQ ID NO: 1559 - RNA, 16 nt, Homo sapiens
cgcguggaccgaguga

SEQ ID NO: 1560 - RNA, 16 nt, Homo sapiens
uggaccgagugaccgu

SEQ ID NO: 1561 - RNA, 16 nt, Homo sapiens
cgugguuucugugugg

SEQ ID NO: 1562 - RNA, 16 nt, Homo sapiens
ugguuucuguguggug

SEQ ID NO: 1563 - RNA, 16 nt, Homo sapiens
ucuguguggugucacc

SEQ ID NO: 1564 - RNA, 16 nt, Homo sapiens
ggugucaccugccaga

SEQ ID NO: 1565 - RNA, 16 nt, Homo sapiens
ugccagacccgccgaa

SEQ ID NO: 1566 - RNA, 16 nt, Homo sapiens
cagacccgccgaagaa

SEQ ID NO: 1567 - RNA, 16 nt, Homo sapiens
uuuggagggugcgcuc

SEQ ID NO: 1568 - RNA, 16 nt, Homo sapiens
uggagggugcgcucuc

SEQ ID NO: 1569 - RNA, 16 nt, Homo sapiens
ucucuggcacgcgcca

SEQ ID NO: 1570 - RNA, 16 nt, Homo sapiens
ucuggcacgcgccacu

SEQ ID NO: 1571 - RNA, 16 nt, Homo sapiens
uccgugggccgccagc

SEQ ID NO: 1572 - RNA, 16 nt, Homo sapiens
ccagcaccacgcgggc

SEQ ID NO: 1573 - RNA, 16 nt, Homo sapiens
cauccacaucgcggcc

SEQ ID NO: 1574 - RNA, 16 nt, Homo sapiens
ccugggacacgccuug

SEQ ID NO: 1575 - RNA, 16 nt, Homo sapiens
gacacgccuugucccc

SEQ ID NO: 1576 - RNA, 16 nt, Homo sapiens
gucccccgguguacgc

SEQ ID NO: 1577 - RNA, 16 nt, Homo sapiens
cccgguguacgccgag

SEQ ID NO: 1578 - RNA, 16 nt, Homo sapiens
gguguacgccgagacc

SEQ ID NO: 1579 - RNA, 16 nt, Homo sapiens
cuccucaggcgacaag

SEQ ID NO: 1580 - RNA, 16 nt, Homo sapiens
aggagcagcugcggcc

SEQ ID NO: 1581 - RNA, 16 nt, Homo sapiens
ucagcucucugaggcc

SEQ ID NO: 1582 - RNA, 16 nt, Homo sapiens
ggcccagccugacugg

SEQ ID NO: 1583 - RNA, 16 nt, Homo sapiens
ccugacuggcgcucgg

SEQ ID NO: 1584 - RNA, 16 nt, Homo sapiens
ggcccuggaugccagg

SEQ ID NO: 1585 - RNA, 16 nt, Homo sapiens
gggacuccccgcaggu

SEQ ID NO: 1586 - RNA, 16 nt, Homo sapiens
cccgcagguugccccg

SEQ ID NO: 1587 - RNA, 16 nt, Homo sapiens
agguugccccgccugc

SEQ ID NO: 1588 - RNA, 16 nt, Homo sapiens
ugccccgccugcccca

SEQ ID NO: 1589 - RNA, 16 nt, Homo sapiens
cugccccagcgcuacu

SEQ ID NO: 1590 - RNA, 16 nt, Homo sapiens
acuggcaaaugcggcc

SEQ ID NO: 1591 - RNA, 16 nt, Homo sapiens
ugcggccccuguuucu

SEQ ID NO: 1592 - RNA, 16 nt, Homo sapiens
uucuggagcugcuugg

SEQ ID NO: 1593 - RNA, 16 nt, Homo sapiens
ugggaaccacgcgcag

SEQ ID NO: 1594 - RNA, 16 nt, Homo sapiens
ggaaccacgcgcagug

SEQ ID NO: 1595 - RNA, 16 nt, Homo sapiens
cacgcgcagugccccu

SEQ ID NO: 1596 - RNA, 16 nt, Homo sapiens
ccuacggggugcuccu

SEQ ID NO: 1597 - RNA, 16 nt, Homo sapiens
uccucaagacgcacug

SEQ ID NO: 1598 - RNA, 16 nt, Homo sapiens
aagacgcacugcccgc

SEQ ID NO: 1599 - RNA, 16 nt, Homo sapiens
cgcacugcccgcugcg

SEQ ID NO: 1600 - RNA, 16 nt, Homo sapiens
acugcccgcugcgagc

SEQ ID NO: 1601 - RNA, 16 nt, Homo sapiens
ugcccgcugcgagcug

SEQ ID NO: 1602 - RNA, 16 nt, Homo sapiens
gcugcgagcugcgguc

SEQ ID NO: 1603 - RNA, 16 nt, Homo sapiens
agcagccggugucugu

SEQ ID NO: 1604 - RNA, 16 nt, Homo sapiens
gccggugucugugccc

SEQ ID NO: 1605 - RNA, 16 nt, Homo sapiens
cggugucugugcccgg

SEQ ID NO: 1606 - RNA, 16 nt, Homo sapiens
ccagggcucuguggcg

SEQ ID NO: 1607 - RNA, 16 nt, Homo sapiens
ggcggcccccgaggag

SEQ ID NO: 1608 - RNA, 16 nt, Homo sapiens
gacccccgucgccugg

SEQ ID NO: 1609 - RNA, 16 nt, Homo sapiens
gucgccuggugcagcu

SEQ ID NO: 1610 - RNA, 16 nt, Homo sapiens
uggugcagcugcuccg

SEQ ID NO: 1611 - RNA, 16 nt, Homo sapiens
cagcugcuccgccagc

SEQ ID NO: 1612 - RNA, 16 nt, Homo sapiens
ccuggcagguguacgg

SEQ ID NO: 1613 - RNA, 16 nt, Homo sapiens
acggcuucgugcgggc

SEQ ID NO: 1614 - RNA, 16 nt, Homo sapiens
gugcgggccugccugc

SEQ ID NO: 1615 - RNA, 16 nt, Homo sapiens
gggccugccugcgccg

SEQ ID NO: 1616 - RNA, 16 nt, Homo sapiens
gccugccugcgccggc

SEQ ID NO: 1617 - RNA, 16 nt, Homo sapiens
gccggcuggugccccc

SEQ ID NO: 1618 - RNA, 16 nt, Homo sapiens
caggcacaacgaacgc

SEQ ID NO: 1619 - RNA, 16 nt, Homo sapiens
cacaacgaacgccgcu

SEQ ID NO: 1620 - RNA, 16 nt, Homo sapiens
aacgaacgccgcuucc

SEQ ID NO: 1621 - RNA, 16 nt, Homo sapiens
ggggaagcaugccaag

SEQ ID NO: 1622 - RNA, 16 nt, Homo sapiens
ccaagcucucgcugca

SEQ ID NO: 1623 - RNA, 16 nt, Homo sapiens
agcucucgcugcagga

SEQ ID NO: 1624 - RNA, 16 nt, Homo sapiens
ugcaggagcugacgug

SEQ ID NO: 1625 - RNA, 16 nt, Homo sapiens
cguggaagaugagcgu

SEQ ID NO: 1626 - RNA, 16 nt, Homo sapiens
agaugagcgugcggga

SEQ ID NO: 1627 - RNA, 16 nt, Homo sapiens
gugcgggacugcgcuu

SEQ ID NO: 1628 - RNA, 16 nt, Homo sapiens
gcgggacugcgcuugg

SEQ ID NO: 1629 - RNA, 16 nt, Homo sapiens
gcgcuuggcugcgcag

SEQ ID NO: 1630 - RNA, 16 nt, Homo sapiens
gcuuggcugcgcagga

SEQ ID NO: 1631 - RNA, 16 nt, Homo sapiens
gggguuggcuguguuc

SEQ ID NO: 1632 - RNA, 16 nt, Homo sapiens
gguuggcuguguuccg

SEQ ID NO: 1633 - RNA, 16 nt, Homo sapiens
uguuccggccgcagag

SEQ ID NO: 1634 - RNA, 16 nt, Homo sapiens
agcaccgucugcguga

SEQ ID NO: 1635 - RNA, 16 nt, Homo sapiens
ccgucugcgugaggag

SEQ ID NO: 1636 - RNA, 16 nt, Homo sapiens
ccaaguuccugcacug

SEQ ID NO: 1637 - RNA, 16 nt, Homo sapiens
ugcacuggcugaugag

SEQ ID NO: 1638 - RNA, 16 nt, Homo sapiens
acuggcugaugagugu

SEQ ID NO: 1639 - RNA, 16 nt, Homo sapiens
gcugaugaguguguac

SEQ ID NO: 1640 - RNA, 16 nt, Homo sapiens
ugaugaguguguacgu

SEQ ID NO: 1641 - RNA, 16 nt, Homo sapiens
guacgucgucgagcug

SEQ ID NO: 1642 - RNA, 16 nt, Homo sapiens
ucgucgagcugcucag

SEQ ID NO: 1643 - RNA, 16 nt, Homo sapiens
uuucuuuuaugucacg

SEQ ID NO: 1644 - RNA, 16 nt, Homo sapiens
ccggaagagugucugg

SEQ ID NO: 1645 - RNA, 16 nt, Homo sapiens
ggagcaaguugcaaag

SEQ ID NO: 1646 - RNA, 16 nt, Homo sapiens
gacagcacuugaagag

SEQ ID NO: 1647 - RNA, 16 nt, Homo sapiens
ugaagagggugcagcu

SEQ ID NO: 1648 - RNA, 16 nt, Homo sapiens
gggugcagcugcggga

SEQ ID NO: 1649 - RNA, 16 nt, Homo sapiens
ugcgggagcugucgga

SEQ ID NO: 1650 - RNA, 16 nt, Homo sapiens
agccaggcccgcccug

SEQ ID NO: 1651 - RNA, 16 nt, Homo sapiens
ggcccgcccugcugac

SEQ ID NO: 1652 - RNA, 16 nt, Homo sapiens
ccgcccugcugacguc

SEQ ID NO: 1653 - RNA, 16 nt, Homo sapiens
uccagacuccgcuuca

SEQ ID NO: 1654 - RNA, 16 nt, Homo sapiens
ccccaagccugacggg

SEQ ID NO: 1655 - RNA, 16 nt, Homo sapiens
cugacgggcugcggcc

SEQ ID NO: 1656 - RNA, 16 nt, Homo sapiens
ggcugcggccgauugu

SEQ ID NO: 1657 - RNA, 16 nt, Homo sapiens
gcggccgauugugaac

SEQ ID NO: 1658 - RNA, 16 nt, Homo sapiens
ggccgauugugaacau

SEQ ID NO: 1659 - RNA, 16 nt, Homo sapiens
agaacguuccgcagag

SEQ ID NO: 1660 - RNA, 16 nt, Homo sapiens
aaagagggccgagcgu

SEQ ID NO: 1661 - RNA, 16 nt, Homo sapiens
gucucaccucgagggu

SEQ ID NO: 1662 - RNA, 16 nt, Homo sapiens
ccucgagggugaaggc

SEQ ID NO: 1663 - RNA, 16 nt, Homo sapiens
ugaaggcacuguucag

SEQ ID NO: 1664 - RNA, 16 nt, Homo sapiens
uguucagcgugcucaa

SEQ ID NO: 1665 - RNA, 16 nt, Homo sapiens
gcucaacuacgagcgg

SEQ ID NO: 1666 - RNA, 16 nt, Homo sapiens
acgagcgggcgcggcg

SEQ ID NO: 1667 - RNA, 16 nt, Homo sapiens
cgggcgcggcgccccg

SEQ ID NO: 1668 - RNA, 16 nt, Homo sapiens
ccuccugggcgccucu

SEQ ID NO: 1669 - RNA, 16 nt, Homo sapiens
gggcgccucugugcug

SEQ ID NO: 1670 - RNA, 16 nt, Homo sapiens
gcgccucugugcuggg

SEQ ID NO: 1671 - RNA, 16 nt, Homo sapiens
gggccuggacgauauc

SEQ ID NO: 1672 - RNA, 16 nt, Homo sapiens
agggccuggcgcaccu

SEQ ID NO: 1673 - RNA, 16 nt, Homo sapiens
gcaccuucgugcugcg

SEQ ID NO: 1674 - RNA, 16 nt, Homo sapiens
ccuucgugcugcgugu

SEQ ID NO: 1675 - RNA, 16 nt, Homo sapiens
cgugcugcgugugcgg

SEQ ID NO: 1676 - RNA, 16 nt, Homo sapiens
ugcugcgugugcgggc

SEQ ID NO: 1677 - RNA, 16 nt, Homo sapiens
cccaggacccgccgcc

SEQ ID NO: 1678 - RNA, 16 nt, Homo sapiens
aggacccgccgccuga

SEQ ID NO: 1679 - RNA, 16 nt, Homo sapiens
cccgccgccugagcug

SEQ ID NO: 1680 - RNA, 16 nt, Homo sapiens
cgccugagcuguacuu

SEQ ID NO: 1681 - RNA, 16 nt, Homo sapiens
gcuguacuuugucaag

SEQ ID NO: 1682 - RNA, 16 nt, Homo sapiens
caagguggaugugacg

SEQ ID NO: 1683 - RNA, 16 nt, Homo sapiens
agguggaugugacggg

SEQ ID NO: 1684 - RNA, 16 nt, Homo sapiens
ugugacgggcgcguac

SEQ ID NO: 1685 - RNA, 16 nt, Homo sapiens
gggcgcguacgacacc

SEQ ID NO: 1686 - RNA, 16 nt, Homo sapiens
ggaggucaucgccagc

SEQ ID NO: 1687 - RNA, 16 nt, Homo sapiens
aacacguacugcgugc

SEQ ID NO: 1688 - RNA, 16 nt, Homo sapiens
cguacugcgugcgucg

SEQ ID NO: 1689 - RNA, 16 nt, Homo sapiens
gcgucgguaugccgug

SEQ ID NO: 1690 - RNA, 16 nt, Homo sapiens
ccagaaggccgcccau

SEQ ID NO: 1691 - RNA, 16 nt, Homo sapiens
gggcacguccgcaagg

SEQ ID NO: 1692 - RNA, 16 nt, Homo sapiens
ucucuaccuugacaga

SEQ ID NO: 1693 - RNA, 16 nt, Homo sapiens
agccguacaugcgaca

SEQ ID NO: 1694 - RNA, 16 nt, Homo sapiens
ccguacaugcgacagu

SEQ ID NO: 1695 - RNA, 16 nt, Homo sapiens
uggcucaccugcagga

SEQ ID NO: 1696 - RNA, 16 nt, Homo sapiens
agaccagcccgcugag

SEQ ID NO: 1697 - RNA, 16 nt, Homo sapiens
ccagcccgcugaggga

SEQ ID NO: 1698 - RNA, 16 nt, Homo sapiens
gcugagggaugccguc

SEQ ID NO: 1699 - RNA, 16 nt, Homo sapiens
cgucgucaucgagcag

SEQ ID NO: 1700 - RNA, 16 nt, Homo sapiens
gcuccucccugaauga

SEQ ID NO: 1701 - RNA, 16 nt, Homo sapiens
cucccugaaugaggcc

SEQ ID NO: 1702 - RNA, 16 nt, Homo sapiens
uggccucuucgacguc

SEQ ID NO: 1703 - RNA, 16 nt, Homo sapiens
gucuuccuacgcuuca

SEQ ID NO: 1704 - RNA, 16 nt, Homo sapiens
uacgcuucaugugcca

SEQ ID NO: 1705 - RNA, 16 nt, Homo sapiens
cgcuucaugugccacc

SEQ ID NO: 1706 - RNA, 16 nt, Homo sapiens
gugccaccacgccgug

SEQ ID NO: 1707 - RNA, 16 nt, Homo sapiens
accacgccgugcgcau

SEQ ID NO: 1708 - RNA, 16 nt, Homo sapiens
cacgccgugcgcauca

SEQ ID NO: 1709 - RNA, 16 nt, Homo sapiens
uacguccagugccagg

SEQ ID NO: 1710 - RNA, 16 nt, Homo sapiens
aggggaucccgcaggg

SEQ ID NO: 1711 - RNA, 16 nt, Homo sapiens
uccucuccacgcugcu

SEQ ID NO: 1712 - RNA, 16 nt, Homo sapiens
ucuccacgcugcucug

SEQ ID NO: 1713 - RNA, 16 nt, Homo sapiens
acgcugcucugcagcc

SEQ ID NO: 1714 - RNA, 16 nt, Homo sapiens
ucugcagccugugcua

SEQ ID NO: 1715 - RNA, 16 nt, Homo sapiens
ugcagccugugcuacg

SEQ ID NO: 1716 - RNA, 16 nt, Homo sapiens
gugcuacggcgacaug

SEQ ID NO: 1717 - RNA, 16 nt, Homo sapiens
agaacaagcuguuugc

SEQ ID NO: 1718 - RNA, 16 nt, Homo sapiens
caagcuguuugcgggg

SEQ ID NO: 1719 - RNA, 16 nt, Homo sapiens
gggacgggcugcuccu

SEQ ID NO: 1720 - RNA, 16 nt, Homo sapiens
ggcugcuccugcguuu

SEQ ID NO: 1721 - RNA, 16 nt, Homo sapiens
uuugguggaugauuuc

SEQ ID NO: 1722 - RNA, 16 nt, Homo sapiens
augauuucuuguuggu

SEQ ID NO: 1723 - RNA, 16 nt, Homo sapiens
ucuuguuggugacacc

SEQ ID NO: 1724 - RNA, 16 nt, Homo sapiens
ccucacccacgcgaaa

SEQ ID NO: 1725 - RNA, 16 nt, Homo sapiens
ucacccacgcgaaaac

SEQ ID NO: 1726 - RNA, 16 nt, Homo sapiens
acccugguccgaggug

SEQ ID NO: 1727 - RNA, 16 nt, Homo sapiens
gguccgaggugucccu

SEQ ID NO: 1728 - RNA, 16 nt, Homo sapiens
aggugucccugaguau

SEQ ID NO: 1729 - RNA, 16 nt, Homo sapiens
gaguauggcugcgugg

SEQ ID NO: 1730 - RNA, 16 nt, Homo sapiens
gcugcguggugaacuu

SEQ ID NO: 1731 - RNA, 16 nt, Homo sapiens
uggugaacuugcggaa

SEQ ID NO: 1732 - RNA, 16 nt, Homo sapiens
agacaguggugaacuu

SEQ ID NO: 1733 - RNA, 16 nt, Homo sapiens
gaacuucccuguagaa

SEQ ID NO: 1734 - RNA, 16 nt, Homo sapiens
uguagaagacgaggcc

SEQ ID NO: 1735 - RNA, 16 nt, Homo sapiens
cacggcuuuuguucag

SEQ ID NO: 1736 - RNA, 16 nt, Homo sapiens
uuguucagaugccggc

SEQ ID NO: 1737 - RNA, 16 nt, Homo sapiens
uuccccuggugcggcc

SEQ ID NO: 1738 - RNA, 16 nt, Homo sapiens
ggugcggccugcugcu

SEQ ID NO: 1739 - RNA, 16 nt, Homo sapiens
gcggccugcugcugga

SEQ ID NO: 1740 - RNA, 16 nt, Homo sapiens
cccuggaggugcagag

SEQ ID NO: 1741 - RNA, 16 nt, Homo sapiens
ggugcagagcgacuac

SEQ ID NO: 1742 - RNA, 16 nt, Homo sapiens
cuccagcuaugcccgg

SEQ ID NO: 1743 - RNA, 16 nt, Homo sapiens
accuucaaccgcggcu

SEQ ID NO: 1744 - RNA, 16 nt, Homo sapiens
ggaggaacaugcgucg

SEQ ID NO: 1745 - RNA, 16 nt, Homo sapiens
aacaugcgucgcaaac

SEQ ID NO: 1746 - RNA, 16 nt, Homo sapiens
uuggggucuugcggcu

SEQ ID NO: 1747 - RNA, 16 nt, Homo sapiens
ucuugcggcugaagug

SEQ ID NO: 1748 - RNA, 16 nt, Homo sapiens
cggcugaagugucaca

SEQ ID NO: 1749 - RNA, 16 nt, Homo sapiens
gucacagccuguuucu

SEQ ID NO: 1750 - RNA, 16 nt, Homo sapiens
uucuggauuugcaggu

SEQ ID NO: 1751 - RNA, 16 nt, Homo sapiens
auuugcaggugaacag

SEQ ID NO: 1752 - RNA, 16 nt, Homo sapiens
uccagacggugugcac

SEQ ID NO: 1753 - RNA, 16 nt, Homo sapiens
cagacggugugcacca

SEQ ID NO: 1754 - RNA, 16 nt, Homo sapiens
agauccuccugcugca

SEQ ID NO: 1755 - RNA, 16 nt, Homo sapiens
uccuccugcugcaggc

SEQ ID NO: 1756 - RNA, 16 nt, Homo sapiens
cagguuucacgcaugu

SEQ ID NO: 1757 - RNA, 16 nt, Homo sapiens
uuucacgcaugugugc

SEQ ID NO: 1758 - RNA, 16 nt, Homo sapiens
ucacgcaugugugcug

SEQ ID NO: 1759 - RNA, 16 nt, Homo sapiens
acgcaugugugcugca

SEQ ID NO: 1760 - RNA, 16 nt, Homo sapiens
caugugugcugcagcu

SEQ ID NO: 1761 - RNA, 16 nt, Homo sapiens
cauuuuuccugcgcgu

SEQ ID NO: 1762 - RNA, 16 nt, Homo sapiens
uuuuuccugcgcguca

SEQ ID NO: 1763 - RNA, 16 nt, Homo sapiens
cgucaucucugacacg

SEQ ID NO: 1764 - RNA, 16 nt, Homo sapiens
gccucccucugcuacu

SEQ ID NO: 1765 - RNA, 16 nt, Homo sapiens
acuccauccugaaagc

SEQ ID NO: 1766 - RNA, 16 nt, Homo sapiens
agccaagaacgcaggg

SEQ ID NO: 1767 - RNA, 16 nt, Homo sapiens
acgcagggaugucgcu

SEQ ID NO: 1768 - RNA, 16 nt, Homo sapiens
cagggaugucgcuggg

SEQ ID NO: 1769 - RNA, 16 nt, Homo sapiens
ggccaagggcgccgcc

SEQ ID NO: 1770 - RNA, 16 nt, Homo sapiens
caagggcgccgccggc

SEQ ID NO: 1771 - RNA, 16 nt, Homo sapiens
ccggcccucugcccuc

SEQ ID NO: 1772 - RNA, 16 nt, Homo sapiens
ucugcccuccgaggcc

SEQ ID NO: 1773 - RNA, 16 nt, Homo sapiens
ccgaggccgugcagug

SEQ ID NO: 1774 - RNA, 16 nt, Homo sapiens
ugcaguggcugugcca

SEQ ID NO: 1775 - RNA, 16 nt, Homo sapiens
caguggcugugccacc

SEQ ID NO: 1776 - RNA, 16 nt, Homo sapiens
aagcauuccugcucaa

SEQ ID NO: 1777 - RNA, 16 nt, Homo sapiens
ugcucaagcugacucg

SEQ ID NO: 1778 - RNA, 16 nt, Homo sapiens
aagcugacucgacacc

SEQ ID NO: 1779 - RNA, 16 nt, Homo sapiens
ucgacaccgugucacc

SEQ ID NO: 1780 - RNA, 16 nt, Homo sapiens
ucaccuacgugccacu

SEQ ID NO: 1781 - RNA, 16 nt, Homo sapiens
cagcccagacgcagcu

SEQ ID NO: 1782 - RNA, 16 nt, Homo sapiens
agacgcagcugagucg

SEQ ID NO: 1783 - RNA, 16 nt, Homo sapiens
ucccggggacgacgcu

SEQ ID NO: 1784 - RNA, 16 nt, Homo sapiens
cggggacgacgcugac

SEQ ID NO: 1785 - RNA, 16 nt, Homo sapiens
ggacgacgcugacugc

SEQ ID NO: 1786 - RNA, 16 nt, Homo sapiens
gacgcugacugcccug

SEQ ID NO: 1787 - RNA, 16 nt, Homo sapiens
ccuggaggccgcagcc

SEQ ID NO: 1788 - RNA, 16 nt, Homo sapiens
acccggcacugcccuc

SEQ ID NO: 1789 - RNA, 16 nt, Homo sapiens
auccuggacugauggc

SEQ ID NO: 1790 - RNA, 16 nt, Homo sapiens
auggccacccgcccac

SEQ ID NO: 1791 - RNA, 16 nt, Homo sapiens
cagccaggccgagagc

SEQ ID NO: 1792 - RNA, 16 nt, Homo sapiens
cagcagcccugucacg

SEQ ID NO: 1793 - RNA, 16 nt, Homo sapiens
gcccugucacgccggg

SEQ ID NO: 1794 - RNA, 16 nt, Homo sapiens
acccaggcccgcaccg

SEQ ID NO: 1795 - RNA, 16 nt, Homo sapiens
ggcccgcaccgcuggg

SEQ ID NO: 1796 - RNA, 16 nt, Homo sapiens
cugggagucugaggcc

SEQ ID NO: 1797 - RNA, 16 nt, Homo sapiens
ucugaggccugaguga

SEQ ID NO: 1798 - RNA, 16 nt, Homo sapiens
aggccugagugagugu

SEQ ID NO: 1799 - RNA, 16 nt, Homo sapiens
cugagugaguguuugg

SEQ ID NO: 1800 - RNA, 16 nt, Homo sapiens
guguuuggccgaggcc

SEQ ID NO: 1801 - RNA, 16 nt, Homo sapiens
gccgaggccugcaugu

SEQ ID NO: 1802 - RNA, 16 nt, Homo sapiens
aggccugcauguccgg

SEQ ID NO: 1803 - RNA, 16 nt, Homo sapiens
auguccggcugaaggc

SEQ ID NO: 1804 - RNA, 16 nt, Homo sapiens
gcugaaggcugagugu

SEQ ID NO: 1805 - RNA, 16 nt, Homo sapiens
aaggcugaguguccgg

SEQ ID NO: 1806 - RNA, 16 nt, Homo sapiens
guguccggcugaggcc

SEQ ID NO: 1807 - RNA, 16 nt, Homo sapiens
gcugaggccugagcga

SEQ ID NO: 1808 - RNA, 16 nt, Homo sapiens
aggccugagcgagugu

SEQ ID NO: 1809 - RNA, 16 nt, Homo sapiens
cugagcgaguguccag

SEQ ID NO: 1810 - RNA, 16 nt, Homo sapiens
gccaagggcugagugu

SEQ ID NO: 1811 - RNA, 16 nt, Homo sapiens
agggcugaguguccag

SEQ ID NO: 1812 - RNA, 16 nt, Homo sapiens
cagcacaccugccguc

SEQ ID NO: 1813 - RNA, 16 nt, Homo sapiens
acaggcuggcgcucgg

SEQ ID NO: 1814 - RNA, 16 nt, Homo sapiens
ccccagauucgccauu

SEQ ID NO: 1815 - RNA, 16 nt, Homo sapiens
auucgccauuguucac

SEQ ID NO: 1816 - RNA, 16 nt, Homo sapiens
uucaccccucgcccug

SEQ ID NO: 1817 - RNA, 16 nt, Homo sapiens
cccucgcccugcccuc

SEQ ID NO: 1818 - RNA, 16 nt, Homo sapiens
gcccuccuuugccuuc

SEQ ID NO: 1819 - RNA, 16 nt, Homo sapiens
uggagacccugagaag

SEQ ID NO: 1820 - RNA, 16 nt, Homo sapiens
aauuuggagugaccaa

SEQ ID NO: 1821 - RNA, 16 nt, Homo sapiens
gaccaaaggugugccc

SEQ ID NO: 1822 - RNA, 16 nt, Homo sapiens
ccaaaggugugcccug

SEQ ID NO: 1823 - RNA, 16 nt, Homo sapiens
ggugugcccuguacac

SEQ ID NO: 1824 - RNA, 16 nt, Homo sapiens
guacacaggcgaggac

SEQ ID NO: 1825 - RNA, 16 nt, Homo sapiens
cgaggacccugcaccu

SEQ ID NO: 1826 - RNA, 16 nt, Homo sapiens
gggggucccugugggu

SEQ ID NO: 1827 - RNA, 16 nt, Homo sapiens
ggggggaggugcugug

SEQ ID NO: 1828 - RNA, 16 nt, Homo sapiens
gggaggugcuguggga

SEQ ID NO: 1829 - RNA, 16 nt, Homo sapiens
guaaaauacugaauau

SEQ ID NO: 1830 - RNA, 16 nt, Homo sapiens
cugaauauaugaguuu

SEQ ID NO: 1831 - RNA, 16 nt, Homo sapiens
uuucaguuuugaaaaa

SEQ ID NO: 1832 - RNA, 17 nt, Homo sapiens
gcagcgcuggcguccug

SEQ ID NO: 1833 - RNA, 17 nt, Homo sapiens
agcgcugcgguccugcu

SEQ ID NO: 1834 - RNA, 17 nt, Homo sapiens
ugcguccuggcugcgca

SEQ ID NO: 1835 - RNA, 17 nt, Homo sapiens
guccugcuggcgcacgu

SEQ ID NO: 1836 - RNA, 17 nt, Homo sapiens
ccugcugcggcacgugg

SEQ ID NO: 1837 - RNA, 17 nt, Homo sapiens
ugcugcgcaacguggga

SEQ ID NO: 1838 - RNA, 17 nt, Homo sapiens
cugcgcacggugggaag

SEQ ID NO: 1839 - RNA, 17 nt, Homo sapiens
cgugggaaggcccuggc

SEQ ID NO: 1840 - RNA, 17 nt, Homo sapiens
aagcccugggccccggc

SEQ ID NO: 1841 - RNA, 17 nt, Homo sapiens
uggccccgggccacccc

SEQ ID NO: 1842 - RNA, 17 nt, Homo sapiens
ccccggccaacccccgc

SEQ ID NO: 1843 - RNA, 17 nt, Homo sapiens
ccacccccggcgaugcc

SEQ ID NO: 1844 - RNA, 17 nt, Homo sapiens
cccccgcgaaugccgcg

SEQ ID NO: 1845 - RNA, 17 nt, Homo sapiens
cccgcgauggccgcgcg

SEQ ID NO: 1846 - RNA, 17 nt, Homo sapiens
gcgaugccggcgcgcuc

SEQ ID NO: 1847 - RNA, 17 nt, Homo sapiens
gaugccgcggcgcuccc

SEQ ID NO: 1848 - RNA, 17 nt, Homo sapiens
ugccgcgcggcuccccg

SEQ ID NO: 1849 - RNA, 17 nt, Homo sapiens
cgcuccccggcugccga

SEQ ID NO: 1850 - RNA, 17 nt, Homo sapiens
uccccgcuggccgagcc

SEQ ID NO: 1851 - RNA, 17 nt, Homo sapiens
gcugccgaggccgugcg

SEQ ID NO: 1852 - RNA, 17 nt, Homo sapiens
gccgagccggugcgcuc

SEQ ID NO: 1853 - RNA, 17 nt, Homo sapiens
cgagccguggcgcuccc

SEQ ID NO: 1854 - RNA, 17 nt, Homo sapiens
agccgugcggcucccug

SEQ ID NO: 1855 - RNA, 17 nt, Homo sapiens
cgcucccuggcugcgca

SEQ ID NO: 1856 - RNA, 17 nt, Homo sapiens
ucccugcuggcgcagcc

SEQ ID NO: 1857 - RNA, 17 nt, Homo sapiens
ccugcugcggcagccac

SEQ ID NO: 1858 - RNA, 17 nt, Homo sapiens
gcugcgcaggccacuac

SEQ ID NO: 1859 - RNA, 17 nt, Homo sapiens
gcgcagccaacuaccgc

SEQ ID NO: 1860 - RNA, 17 nt, Homo sapiens
cagccacuaaccgcgag

SEQ ID NO: 1861 - RNA, 17 nt, Homo sapiens
ccacuaccggcgaggug

SEQ ID NO: 1862 - RNA, 17 nt, Homo sapiens
accgcgagggugcugcc

SEQ ID NO: 1863 - RNA, 17 nt, Homo sapiens
cgcgagguggcugccgc

SEQ ID NO: 1864 - RNA, 17 nt, Homo sapiens
gaggugcuggccgcugg

SEQ ID NO: 1865 - RNA, 17 nt, Homo sapiens
gugcugccggcuggcca

SEQ ID NO: 1866 - RNA, 17 nt, Homo sapiens
ugccgcugggccacguu

SEQ ID NO: 1867 - RNA, 17 nt, Homo sapiens
cgcuggccaacguucgu

SEQ ID NO: 1868 - RNA, 17 nt, Homo sapiens
cuggccacgguucgugc

SEQ ID NO: 1869 - RNA, 17 nt, Homo sapiens
ccacguucggugcggcg

SEQ ID NO: 1870 - RNA, 17 nt, Homo sapiens
acguucguggcggcgcc

SEQ ID NO: 1871 - RNA, 17 nt, Homo sapiens
uucgugcgggcgccugg

SEQ ID NO: 1872 - RNA, 17 nt, Homo sapiens
cgugcggcggccugggg

SEQ ID NO: 1873 - RNA, 17 nt, Homo sapiens
cgccugggggccccagg

SEQ ID NO: 1874 - RNA, 17 nt, Homo sapiens
gccccaggggcuggcgg

SEQ ID NO: 1875 - RNA, 17 nt, Homo sapiens
cagggcugggcggcugg

SEQ ID NO: 1876 - RNA, 17 nt, Homo sapiens
ggcuggcgggcuggugc

SEQ ID NO: 1877 - RNA, 17 nt, Homo sapiens
ggcggcugggugcagcg

SEQ ID NO: 1878 - RNA, 17 nt, Homo sapiens
cggcugguggcagcgcg

SEQ ID NO: 1879 - RNA, 17 nt, Homo sapiens
cuggugcaggcgcgggg

SEQ ID NO: 1880 - RNA, 17 nt, Homo sapiens
ggugcagcggcggggac

SEQ ID NO: 1881 - RNA, 17 nt, Homo sapiens
gcgcggggaacccggcg

SEQ ID NO: 1882 - RNA, 17 nt, Homo sapiens
gggacccgggcggcuuu

SEQ ID NO: 1883 - RNA, 17 nt, Homo sapiens
acccggcgggcuuuccg

SEQ ID NO: 1884 - RNA, 17 nt, Homo sapiens
ggcuuuccggcgcgcug

SEQ ID NO: 1885 - RNA, 17 nt, Homo sapiens
cuuuccgcggcgcuggu

SEQ ID NO: 1886 - RNA, 17 nt, Homo sapiens
uuccgcgcggcuggugg

SEQ ID NO: 1887 - RNA, 17 nt, Homo sapiens
gcgcgcuggguggccca

SEQ ID NO: 1888 - RNA, 17 nt, Homo sapiens
cgcuggugggcccagug

SEQ ID NO: 1889 - RNA, 17 nt, Homo sapiens
guggcccaggugccugg

SEQ ID NO: 1890 - RNA, 17 nt, Homo sapiens
ggcccaguggccuggug

SEQ ID NO: 1891 - RNA, 17 nt, Homo sapiens
agugccugggugugcgu

SEQ ID NO: 1892 - RNA, 17 nt, Homo sapiens
ugccugguggugcgugc

SEQ ID NO: 1893 - RNA, 17 nt, Homo sapiens
ccugguguggcgugccc

SEQ ID NO: 1894 - RNA, 17 nt, Homo sapiens
uggugugcggugcccug

SEQ ID NO: 1895 - RNA, 17 nt, Homo sapiens
gugugcguggcccuggg

SEQ ID NO: 1896 - RNA, 17 nt, Homo sapiens
gcccugggaacgcacgg

SEQ ID NO: 1897 - RNA, 17 nt, Homo sapiens
ccugggacggcacggcc

SEQ ID NO: 1898 - RNA, 17 nt, Homo sapiens
ugggacgcaacggccgc

SEQ ID NO: 1899 - RNA, 17 nt, Homo sapiens
gacgcacgggccgcccc

SEQ ID NO: 1900 - RNA, 17 nt, Homo sapiens
gcacggccggccccccg

SEQ ID NO: 1901 - RNA, 17 nt, Homo sapiens
cgccccccggccgcccc

SEQ ID NO: 1902 - RNA, 17 nt, Homo sapiens
cccccgccggcccccuc

SEQ ID NO: 1903 - RNA, 17 nt, Homo sapiens
cuccuuccggccaggug

SEQ ID NO: 1904 - RNA, 17 nt, Homo sapiens
uccgccaggguguccug

SEQ ID NO: 1905 - RNA, 17 nt, Homo sapiens
cgccaggugguccugcc

SEQ ID NO: 1906 - RNA, 17 nt, Homo sapiens
gguguccuggccugaag

SEQ ID NO: 1907 - RNA, 17 nt, Homo sapiens
cugaaggaggcuggugg

SEQ ID NO: 1908 - RNA, 17 nt, Homo sapiens
aggagcuggguggcccg

SEQ ID NO: 1909 - RNA, 17 nt, Homo sapiens
agcuggugggcccgagu

SEQ ID NO: 1910 - RNA, 17 nt, Homo sapiens
uggcccgaggugcugca

SEQ ID NO: 1911 - RNA, 17 nt, Homo sapiens
gcccgaguggcugcaga

SEQ ID NO: 1912 - RNA, 17 nt, Homo sapiens
cgagugcuggcagaggc

SEQ ID NO: 1913 - RNA, 17 nt, Homo sapiens
cugcagagggcugugcg

SEQ ID NO: 1914 - RNA, 17 nt, Homo sapiens
cagaggcuggugcgagc

SEQ ID NO: 1915 - RNA, 17 nt, Homo sapiens
gaggcuguggcgagcgc

SEQ ID NO: 1916 - RNA, 17 nt, Homo sapiens
cugugcgaggcgcggcg

SEQ ID NO: 1917 - RNA, 17 nt, Homo sapiens
gugcgagcggcggcgcg

SEQ ID NO: 1918 - RNA, 17 nt, Homo sapiens
cgagcgcgggcgcgaag

SEQ ID NO: 1919 - RNA, 17 nt, Homo sapiens
agcgcggcggcgaagaa

SEQ ID NO: 1920 - RNA, 17 nt, Homo sapiens
cgcgaagaaacgugcug

SEQ ID NO: 1921 - RNA, 17 nt, Homo sapiens
cgaagaacggugcuggc

SEQ ID NO: 1922 - RNA, 17 nt, Homo sapiens
aagaacguggcuggccu

SEQ ID NO: 1923 - RNA, 17 nt, Homo sapiens
acgugcugggccuucgg

SEQ ID NO: 1924 - RNA, 17 nt, Homo sapiens
ggccuucgggcuucgcg

SEQ ID NO: 1925 - RNA, 17 nt, Homo sapiens
ucggcuucggcgcugcu

SEQ ID NO: 1926 - RNA, 17 nt, Homo sapiens
ggcuucgcggcugcugg

SEQ ID NO: 1927 - RNA, 17 nt, Homo sapiens
uucgcgcuggcuggacg

SEQ ID NO: 1928 - RNA, 17 nt, Homo sapiens
gcugcuggaacggggcc

SEQ ID NO: 1929 - RNA, 17 nt, Homo sapiens
uggacgggggcccgcgg

SEQ ID NO: 1930 - RNA, 17 nt, Homo sapiens
cggggcccggcgggggc

SEQ ID NO: 1931 - RNA, 17 nt, Homo sapiens
ccgcggggggccccccc

SEQ ID NO: 1932 - RNA, 17 nt, Homo sapiens
cccccgagggccuucac

SEQ ID NO: 1933 - RNA, 17 nt, Homo sapiens
aggccuucaaccaccag

SEQ ID NO: 1934 - RNA, 17 nt, Homo sapiens
ccuucaccaaccagcgu

SEQ ID NO: 1935 - RNA, 17 nt, Homo sapiens
caccaccaggcgugcgc

SEQ ID NO: 1936 - RNA, 17 nt, Homo sapiens
ccaccagcggugcgcag

SEQ ID NO: 1937 - RNA, 17 nt, Homo sapiens
accagcguggcgcagcu

SEQ ID NO: 1938 - RNA, 17 nt, Homo sapiens
cagcgugcggcagcuac

SEQ ID NO: 1939 - RNA, 17 nt, Homo sapiens
cgugcgcaggcuaccug

SEQ ID NO: 1940 - RNA, 17 nt, Homo sapiens
gcgcagcuaaccugccc

SEQ ID NO: 1941 - RNA, 17 nt, Homo sapiens
agcuaccuggcccaaca

SEQ ID NO: 1942 - RNA, 17 nt, Homo sapiens
ccugcccaaacacggug

SEQ ID NO: 1943 - RNA, 17 nt, Homo sapiens
ugcccaacaacggugac

SEQ ID NO: 1944 - RNA, 17 nt, Homo sapiens
ccaacacgggugaccga

SEQ ID NO: 1945 - RNA, 17 nt, Homo sapiens
acacggugaaccgacgc

SEQ ID NO: 1946 - RNA, 17 nt, Homo sapiens
ggugaccgaacgcacug

SEQ ID NO: 1947 - RNA, 17 nt, Homo sapiens
ugaccgacggcacugcg

SEQ ID NO: 1948 - RNA, 17 nt, Homo sapiens
accgacgcaacugcggg

SEQ ID NO: 1949 - RNA, 17 nt, Homo sapiens
gacgcacuggcggggga

SEQ ID NO: 1950 - RNA, 17 nt, Homo sapiens
gcgggggaggcggggcg

SEQ ID NO: 1951 - RNA, 17 nt, Homo sapiens
ggagcgggggcgugggg

SEQ ID NO: 1952 - RNA, 17 nt, Homo sapiens
agcggggcggugggggc

SEQ ID NO: 1953 - RNA, 17 nt, Homo sapiens
gcguggggggcugcugc

SEQ ID NO: 1954 - RNA, 17 nt, Homo sapiens
ugggggcuggcugcugc

SEQ ID NO: 1955 - RNA, 17 nt, Homo sapiens
gggcugcuggcugcgcc

SEQ ID NO: 1956 - RNA, 17 nt, Homo sapiens
cugcugcuggcgccgcg

SEQ ID NO: 1957 - RNA, 17 nt, Homo sapiens
gcugcugcggccgcgug

SEQ ID NO: 1958 - RNA, 17 nt, Homo sapiens
gcugcgccggcgugggc

SEQ ID NO: 1959 - RNA, 17 nt, Homo sapiens
ugcgccgcggugggcga

SEQ ID NO: 1960 - RNA, 17 nt, Homo sapiens
ccgcguggggcgacgac

SEQ ID NO: 1961 - RNA, 17 nt, Homo sapiens
cgugggcgaacgacgug

SEQ ID NO: 1962 - RNA, 17 nt, Homo sapiens
gggcgacgaacgugcug

SEQ ID NO: 1963 - RNA, 17 nt, Homo sapiens
gcgacgacggugcuggu

SEQ ID NO: 1964 - RNA, 17 nt, Homo sapiens
gacgacguggcugguuc

SEQ ID NO: 1965 - RNA, 17 nt, Homo sapiens
acgugcuggguucaccu

SEQ ID NO: 1966 - RNA, 17 nt, Homo sapiens
gcugguucaaccugcug

SEQ ID NO: 1967 - RNA, 17 nt, Homo sapiens
guucaccuggcuggcac

SEQ ID NO: 1968 - RNA, 17 nt, Homo sapiens
accugcugggcacgcug

SEQ ID NO: 1969 - RNA, 17 nt, Homo sapiens
cugcuggcaacgcugcg

SEQ ID NO: 1970 - RNA, 17 nt, Homo sapiens
gcuggcacggcugcgcg

SEQ ID NO: 1971 - RNA, 17 nt, Homo sapiens
ggcacgcuggcgcgcuc

SEQ ID NO: 1972 - RNA, 17 nt, Homo sapiens
cacgcugcggcgcucuu

SEQ ID NO: 1973 - RNA, 17 nt, Homo sapiens
cgcugcgcggcucuuug

SEQ ID NO: 1974 - RNA, 17 nt, Homo sapiens
cgcucuuuggugcuggu

SEQ ID NO: 1975 - RNA, 17 nt, Homo sapiens
cucuuuguggcuggugg

SEQ ID NO: 1976 - RNA, 17 nt, Homo sapiens
uugugcuggguggcucc

SEQ ID NO: 1977 - RNA, 17 nt, Homo sapiens
ugcuggugggcucccag

SEQ ID NO: 1978 - RNA, 17 nt, Homo sapiens
ggcucccaggcugcgcc

SEQ ID NO: 1979 - RNA, 17 nt, Homo sapiens
ucccagcuggcgccuac

SEQ ID NO: 1980 - RNA, 17 nt, Homo sapiens
ccagcugcggccuacca

SEQ ID NO: 1981 - RNA, 17 nt, Homo sapiens
cugcgccuaaccaggug

SEQ ID NO: 1982 - RNA, 17 nt, Homo sapiens
ccuaccagggugugcgg

SEQ ID NO: 1983 - RNA, 17 nt, Homo sapiens
uaccagguggugcgggc

SEQ ID NO: 1984 - RNA, 17 nt, Homo sapiens
ccagguguggcgggccg

SEQ ID NO: 1985 - RNA, 17 nt, Homo sapiens
gugugcggggccgccgc

SEQ ID NO: 1986 - RNA, 17 nt, Homo sapiens
ugcgggccggccgcugu

SEQ ID NO: 1987 - RNA, 17 nt, Homo sapiens
gggccgccggcuguacc

SEQ ID NO: 1988 - RNA, 17 nt, Homo sapiens
ccgccgcugguaccagc

SEQ ID NO: 1989 - RNA, 17 nt, Homo sapiens
gccgcuguaaccagcuc

SEQ ID NO: 1990 - RNA, 17 nt, Homo sapiens
cuguaccaggcucggcg

SEQ ID NO: 1991 - RNA, 17 nt, Homo sapiens
ccagcucgggcgcugcc

SEQ ID NO: 1992 - RNA, 17 nt, Homo sapiens
agcucggcggcugccac

SEQ ID NO: 1993 - RNA, 17 nt, Homo sapiens
ucggcgcuggccacuca

SEQ ID NO: 1994 - RNA, 17 nt, Homo sapiens
gcgcugccaacucaggc

SEQ ID NO: 1995 - RNA, 17 nt, Homo sapiens
ccacucagggcccggcc

SEQ ID NO: 1996 - RNA, 17 nt, Homo sapiens
caggcccgggcccccgc

SEQ ID NO: 1997 - RNA, 17 nt, Homo sapiens
cggcccccggccacacg

SEQ ID NO: 1998 - RNA, 17 nt, Homo sapiens
cccccgccaacacgcua

SEQ ID NO: 1999 - RNA, 17 nt, Homo sapiens
cccgccacaacgcuagu

SEQ ID NO: 2000 - RNA, 17 nt, Homo sapiens
cgccacacggcuagugg

SEQ ID NO: 2001 - RNA, 17 nt, Homo sapiens
acacgcuagguggaccc

SEQ ID NO: 2002 - RNA, 17 nt, Homo sapiens
gcuaguggaaccccgaa

SEQ ID NO: 2003 - RNA, 17 nt, Homo sapiens
ccccgaagggcgucugg

SEQ ID NO: 2004 - RNA, 17 nt, Homo sapiens
ccgaaggcggucuggga

SEQ ID NO: 2005 - RNA, 17 nt, Homo sapiens
cgucugggaaugcgaac

SEQ ID NO: 2006 - RNA, 17 nt, Homo sapiens
ucugggauggcgaacgg

SEQ ID NO: 2007 - RNA, 17 nt, Homo sapiens
ggaugcgaaacgggccu

SEQ ID NO: 2008 - RNA, 17 nt, Homo sapiens
gcgaacggggccuggaa

SEQ ID NO: 2009 - RNA, 17 nt, Homo sapiens
ggccuggaaaccauagc

SEQ ID NO: 2010 - RNA, 17 nt, Homo sapiens
cuggaaccaauagcguc

SEQ ID NO: 2011 - RNA, 17 nt, Homo sapiens
gaaccauaggcgucagg

SEQ ID NO: 2012 - RNA, 17 nt, Homo sapiens
accauagcggucaggga

SEQ ID NO: 2013 - RNA, 17 nt, Homo sapiens
ucagggagggccggggu

SEQ ID NO: 2014 - RNA, 17 nt, Homo sapiens
aggccgggggucccccu

SEQ ID NO: 2015 - RNA, 17 nt, Homo sapiens
cccccuggggccugcca

SEQ ID NO: 2016 - RNA, 17 nt, Homo sapiens
cugggccuggccagccc

SEQ ID NO: 2017 - RNA, 17 nt, Homo sapiens
gccugccaggccccggg

SEQ ID NO: 2018 - RNA, 17 nt, Homo sapiens
agccccggggugcgagg

SEQ ID NO: 2019 - RNA, 17 nt, Homo sapiens
ccccggguggcgaggag

SEQ ID NO: 2020 - RNA, 17 nt, Homo sapiens
gcgaggagggcgcgggg

SEQ ID NO: 2021 - RNA, 17 nt, Homo sapiens
gaggaggcggcgggggc

SEQ ID NO: 2022 - RNA, 17 nt, Homo sapiens
gcgcggggggcagugcc

SEQ ID NO: 2023 - RNA, 17 nt, Homo sapiens
cgggggcaggugccagc

SEQ ID NO: 2024 - RNA, 17 nt, Homo sapiens
ggggcaguggccagccg

SEQ ID NO: 2025 - RNA, 17 nt, Homo sapiens
cagugccaggccgaagu

SEQ ID NO: 2026 - RNA, 17 nt, Homo sapiens
cagccgaaggucugccg

SEQ ID NO: 2027 - RNA, 17 nt, Homo sapiens
cgaagucuggccguugc

SEQ ID NO: 2028 - RNA, 17 nt, Homo sapiens
agucugccgguugccca

SEQ ID NO: 2029 - RNA, 17 nt, Homo sapiens
cugccguuggcccaaga

SEQ ID NO: 2030 - RNA, 17 nt, Homo sapiens
cccaagagggcccaggc

SEQ ID NO: 2031 - RNA, 17 nt, Homo sapiens
aggcccagggcguggcg

SEQ ID NO: 2032 - RNA, 17 nt, Homo sapiens
gcccaggcgguggcgcu

SEQ ID NO: 2033 - RNA, 17 nt, Homo sapiens
caggcgugggcgcugcc

SEQ ID NO: 2034 - RNA, 17 nt, Homo sapiens
ggcguggcggcugcccc

SEQ ID NO: 2035 - RNA, 17 nt, Homo sapiens
guggcgcuggccccuga

SEQ ID NO: 2036 - RNA, 17 nt, Homo sapiens
gccccugaggccggagc

SEQ ID NO: 2037 - RNA, 17 nt, Homo sapiens
gagccggaggcggacgc

SEQ ID NO: 2038 - RNA, 17 nt, Homo sapiens
cggagcggaacgcccgu

SEQ ID NO: 2039 - RNA, 17 nt, Homo sapiens
gagcggacggcccguug

SEQ ID NO: 2040 - RNA, 17 nt, Homo sapiens
ggacgcccgguugggca

SEQ ID NO: 2041 - RNA, 17 nt, Homo sapiens
cccguuggggcaggggu

SEQ ID NO: 2042 - RNA, 17 nt, Homo sapiens
gggcaggggguccuggg

SEQ ID NO: 2043 - RNA, 17 nt, Homo sapiens
gguccuggggcccaccc

SEQ ID NO: 2044 - RNA, 17 nt, Homo sapiens
cugggcccaacccgggc

SEQ ID NO: 2045 - RNA, 17 nt, Homo sapiens
ccacccggggcaggacg

SEQ ID NO: 2046 - RNA, 17 nt, Homo sapiens
cgggcaggaacgcgugg

SEQ ID NO: 2047 - RNA, 17 nt, Homo sapiens
ggcaggacggcguggac

SEQ ID NO: 2048 - RNA, 17 nt, Homo sapiens
caggacgcgguggaccg

SEQ ID NO: 2049 - RNA, 17 nt, Homo sapiens
acgcguggaaccgagug

SEQ ID NO: 2050 - RNA, 17 nt, Homo sapiens
uggaccgaggugaccgu

SEQ ID NO: 2051 - RNA, 17 nt, Homo sapiens
accgagugaaccguggu

SEQ ID NO: 2052 - RNA, 17 nt, Homo sapiens
gagugaccggugguuuc

SEQ ID NO: 2053 - RNA, 17 nt, Homo sapiens
ugaccguggguuucugu

SEQ ID NO: 2054 - RNA, 17 nt, Homo sapiens
ugguuucugguguggug

SEQ ID NO: 2055 - RNA, 17 nt, Homo sapiens
guuucuguggugguguc

SEQ ID NO: 2056 - RNA, 17 nt, Homo sapiens
ucugugugggugucacc

SEQ ID NO: 2057 - RNA, 17 nt, Homo sapiens
ugugugguggucaccug

SEQ ID NO: 2058 - RNA, 17 nt, Homo sapiens
guggugucaaccugcca

SEQ ID NO: 2059 - RNA, 17 nt, Homo sapiens
ugucaccuggccagacc

SEQ ID NO: 2060 - RNA, 17 nt, Homo sapiens
ccugccagaacccgccg

SEQ ID NO: 2061 - RNA, 17 nt, Homo sapiens
ccagacccggccgaaga

SEQ ID NO: 2062 - RNA, 17 nt, Homo sapiens
ccgaagaaggccaccuc

SEQ ID NO: 2063 - RNA, 17 nt, Homo sapiens
aagaagccaaccucuuu

SEQ ID NO: 2064 - RNA, 17 nt, Homo sapiens
uuuggaggggugcgcuc

SEQ ID NO: 2065 - RNA, 17 nt, Homo sapiens
uggaggguggcgcucuc

SEQ ID NO: 2066 - RNA, 17 nt, Homo sapiens
gagggugcggcucucug

SEQ ID NO: 2067 - RNA, 17 nt, Homo sapiens
gcucucugggcacgcgc

SEQ ID NO: 2068 - RNA, 17 nt, Homo sapiens
ucucuggcaacgcgcca

SEQ ID NO: 2069 - RNA, 17 nt, Homo sapiens
ucuggcacggcgccacu

SEQ ID NO: 2070 - RNA, 17 nt, Homo sapiens
uggcacgcggccacucc

SEQ ID NO: 2071 - RNA, 17 nt, Homo sapiens
cacgcgccaacucccac

SEQ ID NO: 2072 - RNA, 17 nt, Homo sapiens
ccacucccaacccaucc

SEQ ID NO: 2073 - RNA, 17 nt, Homo sapiens
ucccacccaauccgugg

SEQ ID NO: 2074 - RNA, 17 nt, Homo sapiens
acccauccggugggccg

SEQ ID NO: 2075 - RNA, 17 nt, Homo sapiens
auccguggggccgccag

SEQ ID NO: 2076 - RNA, 17 nt, Homo sapiens
cgugggccggccagcac

SEQ ID NO: 2077 - RNA, 17 nt, Homo sapiens
ggccgccaggcaccacg

SEQ ID NO: 2078 - RNA, 17 nt, Homo sapiens
ccgccagcaaccacgcg

SEQ ID NO: 2079 - RNA, 17 nt, Homo sapiens
ccagcaccaacgcgggc

SEQ ID NO: 2080 - RNA, 17 nt, Homo sapiens
agcaccacggcgggccc

SEQ ID NO: 2081 - RNA, 17 nt, Homo sapiens
ccacgcggggcccccca

SEQ ID NO: 2082 - RNA, 17 nt, Homo sapiens
ggccccccaauccacau

SEQ ID NO: 2083 - RNA, 17 nt, Homo sapiens
ccccauccaacaucgcg

SEQ ID NO: 2084 - RNA, 17 nt, Homo sapiens
ccauccacaaucgcggc

SEQ ID NO: 2085 - RNA, 17 nt, Homo sapiens
uccacaucggcggccac

SEQ ID NO: 2086 - RNA, 17 nt, Homo sapiens
acaucgcgggccaccac

SEQ ID NO: 2087 - RNA, 17 nt, Homo sapiens
ucgcggccaaccacguc

SEQ ID NO: 2088 - RNA, 17 nt, Homo sapiens
cggccaccaacgucccu

SEQ ID NO: 2089 - RNA, 17 nt, Homo sapiens
gccaccacggucccugg

SEQ ID NO: 2090 - RNA, 17 nt, Homo sapiens
ucccugggaacacgccu

SEQ ID NO: 2091 - RNA, 17 nt, Homo sapiens
ccugggacaacgccuug

SEQ ID NO: 2092 - RNA, 17 nt, Homo sapiens
ugggacacggccuuguc

SEQ ID NO: 2093 - RNA, 17 nt, Homo sapiens
cacgccuuggucccccg

SEQ ID NO: 2094 - RNA, 17 nt, Homo sapiens
gucccccggguguacgc

SEQ ID NO: 2095 - RNA, 17 nt, Homo sapiens
cccccggugguacgccg

SEQ ID NO: 2096 - RNA, 17 nt, Homo sapiens
cccgguguaacgccgag

SEQ ID NO: 2097 - RNA, 17 nt, Homo sapiens
cgguguacggccgagac

SEQ ID NO: 2098 - RNA, 17 nt, Homo sapiens
acgccgagaaccaagca

SEQ ID NO: 2099 - RNA, 17 nt, Homo sapiens
gagaccaaggcacuucc

SEQ ID NO: 2100 - RNA, 17 nt, Homo sapiens
gaccaagcaacuuccuc

SEQ ID NO: 2101 - RNA, 17 nt, Homo sapiens
cuuccucuaacuccuca

SEQ ID NO: 2102 - RNA, 17 nt, Homo sapiens
cuccucagggcgacaag

SEQ ID NO: 2103 - RNA, 17 nt, Homo sapiens
cucaggcgaacaaggag

SEQ ID NO: 2104 - RNA, 17 nt, Homo sapiens
gacaaggaggcagcugc

SEQ ID NO: 2105 - RNA, 17 nt, Homo sapiens
aaggagcaggcugcggc

SEQ ID NO: 2106 - RNA, 17 nt, Homo sapiens
gagcagcuggcggcccu

SEQ ID NO: 2107 - RNA, 17 nt, Homo sapiens
cagcugcgggcccuccu

SEQ ID NO: 2108 - RNA, 17 nt, Homo sapiens
uccuuccuaacucagcu

SEQ ID NO: 2109 - RNA, 17 nt, Homo sapiens
ccuacucaggcucucug

SEQ ID NO: 2110 - RNA, 17 nt, Homo sapiens
ucucugagggcccagcc

SEQ ID NO: 2111 - RNA, 17 nt, Homo sapiens
gaggcccaggccugacu

SEQ ID NO: 2112 - RNA, 17 nt, Homo sapiens
ccagccugaacuggcgc

SEQ ID NO: 2113 - RNA, 17 nt, Homo sapiens
ccugacugggcgcucgg

SEQ ID NO: 2114 - RNA, 17 nt, Homo sapiens
ugacuggcggcucggag

SEQ ID NO: 2115 - RNA, 17 nt, Homo sapiens
gcucggagggcucgugg

SEQ ID NO: 2116 - RNA, 17 nt, Homo sapiens
ggaggcucgguggagac

SEQ ID NO: 2117 - RNA, 17 nt, Homo sapiens
ucguggagaaccaucuu

SEQ ID NO: 2118 - RNA, 17 nt, Homo sapiens
uggagaccaaucuuucu

SEQ ID NO: 2119 - RNA, 17 nt, Homo sapiens
cuuucugggguuccagg

SEQ ID NO: 2120 - RNA, 17 nt, Homo sapiens
gguuccagggcccugga

SEQ ID NO: 2121 - RNA, 17 nt, Homo sapiens
ggcccuggaaugccagg

SEQ ID NO: 2122 - RNA, 17 nt, Homo sapiens
cccuggauggccaggga

SEQ ID NO: 2123 - RNA, 17 nt, Homo sapiens
ugccagggaacuccccg

SEQ ID NO: 2124 - RNA, 17 nt, Homo sapiens
gacuccccggcagguug

SEQ ID NO: 2125 - RNA, 17 nt, Homo sapiens
ccccgcaggguugcccc

SEQ ID NO: 2126 - RNA, 17 nt, Homo sapiens
cgcagguuggccccgcc

SEQ ID NO: 2127 - RNA, 17 nt, Homo sapiens
guugccccggccugccc

SEQ ID NO: 2128 - RNA, 17 nt, Homo sapiens
ccccgccuggccccagc

SEQ ID NO: 2129 - RNA, 17 nt, Homo sapiens
cugccccaggcgcuacu

SEQ ID NO: 2130 - RNA, 17 nt, Homo sapiens
gccccagcggcuacugg

SEQ ID NO: 2131 - RNA, 17 nt, Homo sapiens
ccagcgcuaacuggcaa

SEQ ID NO: 2132 - RNA, 17 nt, Homo sapiens
cgcuacugggcaaaugc

SEQ ID NO: 2133 - RNA, 17 nt, Homo sapiens
acuggcaaaaugcggcc

SEQ ID NO: 2134 - RNA, 17 nt, Homo sapiens
uggcaaauggcggcccc

SEQ ID NO: 2135 - RNA, 17 nt, Homo sapiens
caaaugcgggccccugu

SEQ ID NO: 2136 - RNA, 17 nt, Homo sapiens
cggccccugguuucugg

SEQ ID NO: 2137 - RNA, 17 nt, Homo sapiens
uuucuggaggcugcuug

SEQ ID NO: 2138 - RNA, 17 nt, Homo sapiens
cuggagcuggcuuggga

SEQ ID NO: 2139 - RNA, 17 nt, Homo sapiens
gcuugggaaaccacgcg

SEQ ID NO: 2140 - RNA, 17 nt, Homo sapiens
ugggaaccaacgcgcag

SEQ ID NO: 2141 - RNA, 17 nt, Homo sapiens
ggaaccacggcgcagug

SEQ ID NO: 2142 - RNA, 17 nt, Homo sapiens
aaccacgcggcagugcc

SEQ ID NO: 2143 - RNA, 17 nt, Homo sapiens
cacgcgcaggugccccu

SEQ ID NO: 2144 - RNA, 17 nt, Homo sapiens
cgcgcaguggccccuac

SEQ ID NO: 2145 - RNA, 17 nt, Homo sapiens
gugccccuaacggggug

SEQ ID NO: 2146 - RNA, 17 nt, Homo sapiens
ccuacgggggugcuccu

SEQ ID NO: 2147 - RNA, 17 nt, Homo sapiens
uacgggguggcuccuca

SEQ ID NO: 2148 - RNA, 17 nt, Homo sapiens
uccucaagaacgcacug

SEQ ID NO: 2149 - RNA, 17 nt, Homo sapiens
cucaagacggcacugcc

SEQ ID NO: 2150 - RNA, 17 nt, Homo sapiens
caagacgcaacugcccg

SEQ ID NO: 2151 - RNA, 17 nt, Homo sapiens
gacgcacuggcccgcug

SEQ ID NO: 2152 - RNA, 17 nt, Homo sapiens
cacugcccggcugcgag

SEQ ID NO: 2153 - RNA, 17 nt, Homo sapiens
ugcccgcuggcgagcug

SEQ ID NO: 2154 - RNA, 17 nt, Homo sapiens
cgcugcgaggcugcggu

SEQ ID NO: 2155 - RNA, 17 nt, Homo sapiens
ugcgagcuggcggucac

SEQ ID NO: 2156 - RNA, 17 nt, Homo sapiens
gagcugcgggucacccc

SEQ ID NO: 2157 - RNA, 17 nt, Homo sapiens
cugcggucaaccccagc

SEQ ID NO: 2158 - RNA, 17 nt, Homo sapiens
ucaccccaggcagccgg

SEQ ID NO: 2159 - RNA, 17 nt, Homo sapiens
ccccagcaggccggugu

SEQ ID NO: 2160 - RNA, 17 nt, Homo sapiens
agcagccgggugucugu

SEQ ID NO: 2161 - RNA, 17 nt, Homo sapiens
cagccgguggucugugc

SEQ ID NO: 2162 - RNA, 17 nt, Homo sapiens
cggugucuggugcccgg

SEQ ID NO: 2163 - RNA, 17 nt, Homo sapiens
gugucuguggcccggga

SEQ ID NO: 2164 - RNA, 17 nt, Homo sapiens
cgggagaaggccccagg

SEQ ID NO: 2165 - RNA, 17 nt, Homo sapiens
gccccaggggcucugug

SEQ ID NO: 2166 - RNA, 17 nt, Homo sapiens
agggcucugguggcggc

SEQ ID NO: 2167 - RNA, 17 nt, Homo sapiens
gcucugugggcggcccc

SEQ ID NO: 2168 - RNA, 17 nt, Homo sapiens
cuguggcgggcccccga

SEQ ID NO: 2169 - RNA, 17 nt, Homo sapiens
ggaggaggaacacagac

SEQ ID NO: 2170 - RNA, 17 nt, Homo sapiens
aggaggacaacagaccc

SEQ ID NO: 2171 - RNA, 17 nt, Homo sapiens
ggacacagaacccccgu

SEQ ID NO: 2172 - RNA, 17 nt, Homo sapiens
agacccccggucgccug

SEQ ID NO: 2173 - RNA, 17 nt, Homo sapiens
cccccgucggccuggug

SEQ ID NO: 2174 - RNA, 17 nt, Homo sapiens
gucgccugggugcagcu

SEQ ID NO: 2175 - RNA, 17 nt, Homo sapiens
cgccugguggcagcugc

SEQ ID NO: 2176 - RNA, 17 nt, Homo sapiens
cuggugcaggcugcucc

SEQ ID NO: 2177 - RNA, 17 nt, Homo sapiens
gugcagcuggcuccgcc

SEQ ID NO: 2178 - RNA, 17 nt, Homo sapiens
gcugcuccggccagcac

SEQ ID NO: 2179 - RNA, 17 nt, Homo sapiens
cuccgccaggcacagca

SEQ ID NO: 2180 - RNA, 17 nt, Homo sapiens
ccgccagcaacagcagc

SEQ ID NO: 2181 - RNA, 17 nt, Homo sapiens
ccagcacaggcagcccc

SEQ ID NO: 2182 - RNA, 17 nt, Homo sapiens
gcacagcaggccccugg

SEQ ID NO: 2183 - RNA, 17 nt, Homo sapiens
agccccugggcaggugu

SEQ ID NO: 2184 - RNA, 17 nt, Homo sapiens
ccuggcaggguguacgg

SEQ ID NO: 2185 - RNA, 17 nt, Homo sapiens
uggcaggugguacggcu

SEQ ID NO: 2186 - RNA, 17 nt, Homo sapiens
gcagguguaacggcuuc

SEQ ID NO: 2187 - RNA, 17 nt, Homo sapiens
gguguacgggcuucgug

SEQ ID NO: 2188 - RNA, 17 nt, Homo sapiens
acggcuucggugcgggc

SEQ ID NO: 2189 - RNA, 17 nt, Homo sapiens
ggcuucguggcgggccu

SEQ ID NO: 2190 - RNA, 17 nt, Homo sapiens
ucgugcggggccugccu

SEQ ID NO: 2191 - RNA, 17 nt, Homo sapiens
gcgggccuggccugcgc

SEQ ID NO: 2192 - RNA, 17 nt, Homo sapiens
gccugccuggcgccggc

SEQ ID NO: 2193 - RNA, 17 nt, Homo sapiens
cugccugcggccggcug

SEQ ID NO: 2194 - RNA, 17 nt, Homo sapiens
cugcgccgggcuggugc

SEQ ID NO: 2195 - RNA, 17 nt, Homo sapiens
gccggcugggugccccc

SEQ ID NO: 2196 - RNA, 17 nt, Homo sapiens
cggcugguggcccccag

SEQ ID NO: 2197 - RNA, 17 nt, Homo sapiens
gcccccagggccucugg

SEQ ID NO: 2198 - RNA, 17 nt, Homo sapiens
ccucugggggcuccagg

SEQ ID NO: 2199 - RNA, 17 nt, Homo sapiens
ggcuccagggcacaacg

SEQ ID NO: 2200 - RNA, 17 nt, Homo sapiens
cuccaggcaacaacgaa

SEQ ID NO: 2201 - RNA, 17 nt, Homo sapiens
caggcacaaacgaacgc

SEQ ID NO: 2202 - RNA, 17 nt, Homo sapiens
cacaacgaaacgccgcu

SEQ ID NO: 2203 - RNA, 17 nt, Homo sapiens
caacgaacggccgcuuc

SEQ ID NO: 2204 - RNA, 17 nt, Homo sapiens
cgaacgccggcuuccuc

SEQ ID NO: 2205 - RNA, 17 nt, Homo sapiens
ccucaggaaacaccaag

SEQ ID NO: 2206 - RNA, 17 nt, Homo sapiens
ucaggaacaaccaagaa

SEQ ID NO: 2207 - RNA, 17 nt, Homo sapiens
accaagaagguucaucu

SEQ ID NO: 2208 - RNA, 17 nt, Homo sapiens
agaaguucaaucucccu

SEQ ID NO: 2209 - RNA, 17 nt, Homo sapiens
cuggggaaggcaugcca

SEQ ID NO: 2210 - RNA, 17 nt, Homo sapiens
ggggaagcaaugccaag

SEQ ID NO: 2211 - RNA, 17 nt, Homo sapiens
ggaagcauggccaagcu

SEQ ID NO: 2212 - RNA, 17 nt, Homo sapiens
caugccaaggcucucgc

SEQ ID NO: 2213 - RNA, 17 nt, Homo sapiens
aagcucucggcugcagg

SEQ ID NO: 2214 - RNA, 17 nt, Homo sapiens
cucucgcuggcaggagc

SEQ ID NO: 2215 - RNA, 17 nt, Homo sapiens
cugcaggaggcugacgu

SEQ ID NO: 2216 - RNA, 17 nt, Homo sapiens
aggagcugaacguggaa

SEQ ID NO: 2217 - RNA, 17 nt, Homo sapiens
gagcugacgguggaaga

SEQ ID NO: 2218 - RNA, 17 nt, Homo sapiens
cguggaagaaugagcgu

SEQ ID NO: 2219 - RNA, 17 nt, Homo sapiens
gaagaugaggcgugcgg

SEQ ID NO: 2220 - RNA, 17 nt, Homo sapiens
agaugagcggugcggga

SEQ ID NO: 2221 - RNA, 17 nt, Homo sapiens
augagcguggcgggacu

SEQ ID NO: 2222 - RNA, 17 nt, Homo sapiens
cgugcgggaacugcgcu

SEQ ID NO: 2223 - RNA, 17 nt, Homo sapiens
gcgggacuggcgcuugg

SEQ ID NO: 2224 - RNA, 17 nt, Homo sapiens
gggacugcggcuuggcu

SEQ ID NO: 2225 - RNA, 17 nt, Homo sapiens
ugcgcuugggcugcgca

SEQ ID NO: 2226 - RNA, 17 nt, Homo sapiens
gcuuggcuggcgcagga

SEQ ID NO: 2227 - RNA, 17 nt, Homo sapiens
uuggcugcggcaggagc

SEQ ID NO: 2228 - RNA, 17 nt, Homo sapiens
gcgcaggaggcccaggg

SEQ ID NO: 2229 - RNA, 17 nt, Homo sapiens
gcccaggggguuggcug

SEQ ID NO: 2230 - RNA, 17 nt, Homo sapiens
agggguugggcuguguu

SEQ ID NO: 2231 - RNA, 17 nt, Homo sapiens
gguuggcugguguuccg

SEQ ID NO: 2232 - RNA, 17 nt, Homo sapiens
uuggcugugguuccggc

SEQ ID NO: 2233 - RNA, 17 nt, Homo sapiens
guguuccgggccgcaga

SEQ ID NO: 2234 - RNA, 17 nt, Homo sapiens
uuccggccggcagagca

SEQ ID NO: 2235 - RNA, 17 nt, Homo sapiens
gccgcagaggcaccguc

SEQ ID NO: 2236 - RNA, 17 nt, Homo sapiens
cgcagagcaaccgucug

SEQ ID NO: 2237 - RNA, 17 nt, Homo sapiens
agagcaccggucugcgu

SEQ ID NO: 2238 - RNA, 17 nt, Homo sapiens
caccgucuggcgugagg

SEQ ID NO: 2239 - RNA, 17 nt, Homo sapiens
ccgucugcggugaggag

SEQ ID NO: 2240 - RNA, 17 nt, Homo sapiens
gugaggagaauccuggc

SEQ ID NO: 2241 - RNA, 17 nt, Homo sapiens
agauccugggccaaguu

SEQ ID NO: 2242 - RNA, 17 nt, Homo sapiens
cuggccaagguuccugc

SEQ ID NO: 2243 - RNA, 17 nt, Homo sapiens
aaguuccuggcacuggc

SEQ ID NO: 2244 - RNA, 17 nt, Homo sapiens
guuccugcaacuggcug

SEQ ID NO: 2245 - RNA, 17 nt, Homo sapiens
cugcacugggcugauga

SEQ ID NO: 2246 - RNA, 17 nt, Homo sapiens
acuggcugaaugagugu

SEQ ID NO: 2247 - RNA, 17 nt, Homo sapiens
gcugaugagguguguac

SEQ ID NO: 2248 - RNA, 17 nt, Homo sapiens
ugaugagugguguacgu

SEQ ID NO: 2249 - RNA, 17 nt, Homo sapiens
augagugugguacgucg

SEQ ID NO: 2250 - RNA, 17 nt, Homo sapiens
gaguguguaacgucguc

SEQ ID NO: 2251 - RNA, 17 nt, Homo sapiens
guguguacggucgucga

SEQ ID NO: 2252 - RNA, 17 nt, Homo sapiens
uguacgucggucgagcu

SEQ ID NO: 2253 - RNA, 17 nt, Homo sapiens
gucgucgaggcugcuca

SEQ ID NO: 2254 - RNA, 17 nt, Homo sapiens
gucgagcuggcucaggu

SEQ ID NO: 2255 - RNA, 17 nt, Homo sapiens
cugcucagggucuuucu

SEQ ID NO: 2256 - RNA, 17 nt, Homo sapiens
uuucuuuuaaugucacg

SEQ ID NO: 2257 - RNA, 17 nt, Homo sapiens
ucuuuuauggucacgga

SEQ ID NO: 2258 - RNA, 17 nt, Homo sapiens
uuuaugucaacggagac

SEQ ID NO: 2259 - RNA, 17 nt, Homo sapiens
ucacggagaaccacguu

SEQ ID NO: 2260 - RNA, 17 nt, Homo sapiens
cggagaccaacguuuca

SEQ ID NO: 2261 - RNA, 17 nt, Homo sapiens
gagaccacgguuucaaa

SEQ ID NO: 2262 - RNA, 17 nt, Homo sapiens
ucaaaagaaacaggcuc

SEQ ID NO: 2263 - RNA, 17 nt, Homo sapiens
aagaacagggcucuuuu

SEQ ID NO: 2264 - RNA, 17 nt, Homo sapiens
cuuuuucuaaccggaag

SEQ ID NO: 2265 - RNA, 17 nt, Homo sapiens
ccggaagaggugucugg

SEQ ID NO: 2266 - RNA, 17 nt, Homo sapiens
ggaagaguggucuggag

SEQ ID NO: 2267 - RNA, 17 nt, Homo sapiens
ugucuggaggcaaguug

SEQ ID NO: 2268 - RNA, 17 nt, Homo sapiens
uggagcaagguugcaaa

SEQ ID NO: 2269 - RNA, 17 nt, Homo sapiens
agcaaguuggcaaagca

SEQ ID NO: 2270 - RNA, 17 nt, Homo sapiens
guugcaaaggcauugga

SEQ ID NO: 2271 - RNA, 17 nt, Homo sapiens
ugcaaagcaauuggaau

SEQ ID NO: 2272 - RNA, 17 nt, Homo sapiens
gcauuggaaaucagaca

SEQ ID NO: 2273 - RNA, 17 nt, Homo sapiens
ggaaucagaacagcacu

SEQ ID NO: 2274 - RNA, 17 nt, Homo sapiens
aucagacaggcacuuga

SEQ ID NO: 2275 - RNA, 17 nt, Homo sapiens
cagacagcaacuugaag

SEQ ID NO: 2276 - RNA, 17 nt, Homo sapiens
ugaagaggggugcagcu

SEQ ID NO: 2277 - RNA, 17 nt, Homo sapiens
aagaggguggcagcugc

SEQ ID NO: 2278 - RNA, 17 nt, Homo sapiens
agggugcaggcugcggg

SEQ ID NO: 2279 - RNA, 17 nt, Homo sapiens
gugcagcuggcgggagc

SEQ ID NO: 2280 - RNA, 17 nt, Homo sapiens
cugcgggaggcugucgg

SEQ ID NO: 2281 - RNA, 17 nt, Homo sapiens
cgggagcuggucggaag

SEQ ID NO: 2282 - RNA, 17 nt, Homo sapiens
ugucggaaggcagaggu

SEQ ID NO: 2283 - RNA, 17 nt, Homo sapiens
aagcagagggucaggca

SEQ ID NO: 2284 - RNA, 17 nt, Homo sapiens
gaggucagggcagcauc

SEQ ID NO: 2285 - RNA, 17 nt, Homo sapiens
gucaggcaggcaucggg

SEQ ID NO: 2286 - RNA, 17 nt, Homo sapiens
caggcagcaaucgggaa

SEQ ID NO: 2287 - RNA, 17 nt, Homo sapiens
aucgggaaggccaggcc

SEQ ID NO: 2288 - RNA, 17 nt, Homo sapiens
gaagccagggcccgccc

SEQ ID NO: 2289 - RNA, 17 nt, Homo sapiens
ccaggcccggcccugcu

SEQ ID NO: 2290 - RNA, 17 nt, Homo sapiens
cccgcccuggcugacgu

SEQ ID NO: 2291 - RNA, 17 nt, Homo sapiens
cccugcugaacguccag

SEQ ID NO: 2292 - RNA, 17 nt, Homo sapiens
cugcugacgguccagac

SEQ ID NO: 2293 - RNA, 17 nt, Homo sapiens
acguccagaacuccgcu

SEQ ID NO: 2294 - RNA, 17 nt, Homo sapiens
cagacuccggcuucauc

SEQ ID NO: 2295 - RNA, 17 nt, Homo sapiens
uccgcuucaauccccaa

SEQ ID NO: 2296 - RNA, 17 nt, Homo sapiens
auccccaaggccugacg

SEQ ID NO: 2297 - RNA, 17 nt, Homo sapiens
caagccugaacgggcug

SEQ ID NO: 2298 - RNA, 17 nt, Homo sapiens
ccugacggggcugcggc

SEQ ID NO: 2299 - RNA, 17 nt, Homo sapiens
gacgggcuggcggccga

SEQ ID NO: 2300 - RNA, 17 nt, Homo sapiens
gggcugcgggccgauug

SEQ ID NO: 2301 - RNA, 17 nt, Homo sapiens
ugcggccgaauugugaa

SEQ ID NO: 2302 - RNA, 17 nt, Homo sapiens
ggccgauuggugaacau

SEQ ID NO: 2303 - RNA, 17 nt, Homo sapiens
gauugugaaacauggac

SEQ ID NO: 2304 - RNA, 17 nt, Homo sapiens
uugugaacaauggacua

SEQ ID NO: 2305 - RNA, 17 nt, Homo sapiens
gaacauggaacuacguc

SEQ ID NO: 2306 - RNA, 17 nt, Homo sapiens
cauggacuaacgucgug

SEQ ID NO: 2307 - RNA, 17 nt, Homo sapiens
uggacuacggucguggg

SEQ ID NO: 2308 - RNA, 17 nt, Homo sapiens
acuacgucggugggagc

SEQ ID NO: 2309 - RNA, 17 nt, Homo sapiens
ucgugggaggccagaac

SEQ ID NO: 2310 - RNA, 17 nt, Homo sapiens
gagccagaaacguuccg

SEQ ID NO: 2311 - RNA, 17 nt, Homo sapiens
gccagaacgguuccgca

SEQ ID NO: 2312 - RNA, 17 nt, Homo sapiens
aacguuccggcagagaa

SEQ ID NO: 2313 - RNA, 17 nt, Homo sapiens
aaaagaggggccgagcg

SEQ ID NO: 2314 - RNA, 17 nt, Homo sapiens
agggccgaggcgucuca

SEQ ID NO: 2315 - RNA, 17 nt, Homo sapiens
ggccgagcggucucacc

SEQ ID NO: 2316 - RNA, 17 nt, Homo sapiens
agcgucucaaccucgag

SEQ ID NO: 2317 - RNA, 17 nt, Homo sapiens
ccucgaggggugaaggc

SEQ ID NO: 2318 - RNA, 17 nt, Homo sapiens
gggugaagggcacuguu

SEQ ID NO: 2319 - RNA, 17 nt, Homo sapiens
gugaaggcaacuguuca

SEQ ID NO: 2320 - RNA, 17 nt, Homo sapiens
aaggcacugguucagcg

SEQ ID NO: 2321 - RNA, 17 nt, Homo sapiens
acuguucaggcgugcuc

SEQ ID NO: 2322 - RNA, 17 nt, Homo sapiens
uguucagcggugcucaa

SEQ ID NO: 2323 - RNA, 17 nt, Homo sapiens
uucagcguggcucaacu

SEQ ID NO: 2324 - RNA, 17 nt, Homo sapiens
cgugcucaaacuacgag

SEQ ID NO: 2325 - RNA, 17 nt, Homo sapiens
gcucaacuaacgagcgg

SEQ ID NO: 2326 - RNA, 17 nt, Homo sapiens
aacuacgaggcgggcgc

SEQ ID NO: 2327 - RNA, 17 nt, Homo sapiens
acgagcggggcgcggcg

SEQ ID NO: 2328 - RNA, 17 nt, Homo sapiens
gagcgggcggcggcgcc

SEQ ID NO: 2329 - RNA, 17 nt, Homo sapiens
cgggcgcgggcgccccg

SEQ ID NO: 2330 - RNA, 17 nt, Homo sapiens
ggcgcggcggccccggc

SEQ ID NO: 2331 - RNA, 17 nt, Homo sapiens
gcgccccgggccuccug

SEQ ID NO: 2332 - RNA, 17 nt, Homo sapiens
ccuccuggggcgccucu

SEQ ID NO: 2333 - RNA, 17 nt, Homo sapiens
uccugggcggccucugu

SEQ ID NO: 2334 - RNA, 17 nt, Homo sapiens
gcgccucuggugcuggg

SEQ ID NO: 2335 - RNA, 17 nt, Homo sapiens
gccucuguggcugggcc

SEQ ID NO: 2336 - RNA, 17 nt, Homo sapiens
ugugcuggggccuggac

SEQ ID NO: 2337 - RNA, 17 nt, Homo sapiens
gggccuggaacgauauc

SEQ ID NO: 2338 - RNA, 17 nt, Homo sapiens
ccuggacgaauauccac

SEQ ID NO: 2339 - RNA, 17 nt, Homo sapiens
uggacgauaauccacag

SEQ ID NO: 2340 - RNA, 17 nt, Homo sapiens
cgauauccaacagggcc

SEQ ID NO: 2341 - RNA, 17 nt, Homo sapiens
uccacaggggccuggcg

SEQ ID NO: 2342 - RNA, 17 nt, Homo sapiens
agggccugggcgcaccu

SEQ ID NO: 2343 - RNA, 17 nt, Homo sapiens
ggccuggcggcaccuuc

SEQ ID NO: 2344 - RNA, 17 nt, Homo sapiens
ccuggcgcaaccuucgu

SEQ ID NO: 2345 - RNA, 17 nt, Homo sapiens
gcaccuucggugcugcg

SEQ ID NO: 2346 - RNA, 17 nt, Homo sapiens
accuucguggcugcgug

SEQ ID NO: 2347 - RNA, 17 nt, Homo sapiens
uucgugcuggcgugugc

SEQ ID NO: 2348 - RNA, 17 nt, Homo sapiens
cgugcugcggugugcgg

SEQ ID NO: 2349 - RNA, 17 nt, Homo sapiens
ugcugcguggugcgggc

SEQ ID NO: 2350 - RNA, 17 nt, Homo sapiens
cugcguguggcgggccc

SEQ ID NO: 2351 - RNA, 17 nt, Homo sapiens
gugugcggggcccagga

SEQ ID NO: 2352 - RNA, 17 nt, Homo sapiens
ggcccaggaacccgccg

SEQ ID NO: 2353 - RNA, 17 nt, Homo sapiens
caggacccggccgccug

SEQ ID NO: 2354 - RNA, 17 nt, Homo sapiens
gacccgccggccugagc

SEQ ID NO: 2355 - RNA, 17 nt, Homo sapiens
ccgccugaggcuguacu

SEQ ID NO: 2356 - RNA, 17 nt, Homo sapiens
ccugagcugguacuuug

SEQ ID NO: 2357 - RNA, 17 nt, Homo sapiens
ugagcuguaacuuuguc

SEQ ID NO: 2358 - RNA, 17 nt, Homo sapiens
uguacuuuggucaaggu

SEQ ID NO: 2359 - RNA, 17 nt, Homo sapiens
uugucaaggguggaugu

SEQ ID NO: 2360 - RNA, 17 nt, Homo sapiens
caagguggaaugugacg

SEQ ID NO: 2361 - RNA, 17 nt, Homo sapiens
agguggauggugacggg

SEQ ID NO: 2362 - RNA, 17 nt, Homo sapiens
uggaugugaacgggcgc

SEQ ID NO: 2363 - RNA, 17 nt, Homo sapiens
ugugacggggcgcguac

SEQ ID NO: 2364 - RNA, 17 nt, Homo sapiens
ugacgggcggcguacga

SEQ ID NO: 2365 - RNA, 17 nt, Homo sapiens
acgggcgcgguacgaca

SEQ ID NO: 2366 - RNA, 17 nt, Homo sapiens
gggcgcguaacgacacc

SEQ ID NO: 2367 - RNA, 17 nt, Homo sapiens
cgcguacgaacaccauc

SEQ ID NO: 2368 - RNA, 17 nt, Homo sapiens
cguacgacaaccauccc

SEQ ID NO: 2369 - RNA, 17 nt, Homo sapiens
acgacaccaauccccca

SEQ ID NO: 2370 - RNA, 17 nt, Homo sapiens
cccccaggaacaggcuc

SEQ ID NO: 2371 - RNA, 17 nt, Homo sapiens
caggacagggcucacgg

SEQ ID NO: 2372 - RNA, 17 nt, Homo sapiens
acaggcucaacggaggu

SEQ ID NO: 2373 - RNA, 17 nt, Homo sapiens
ucacggagggucaucgc

SEQ ID NO: 2374 - RNA, 17 nt, Homo sapiens
cggaggucaaucgccag

SEQ ID NO: 2375 - RNA, 17 nt, Homo sapiens
aggucaucggccagcau

SEQ ID NO: 2376 - RNA, 17 nt, Homo sapiens
caucgccaggcaucauc

SEQ ID NO: 2377 - RNA, 17 nt, Homo sapiens
ucgccagcaaucaucaa

SEQ ID NO: 2378 - RNA, 17 nt, Homo sapiens
ccagcaucaaucaaacc

SEQ ID NO: 2379 - RNA, 17 nt, Homo sapiens
aucaucaaaaccccaga

SEQ ID NO: 2380 - RNA, 17 nt, Homo sapiens
accccagaaacacguac

SEQ ID NO: 2381 - RNA, 17 nt, Homo sapiens
cccagaacaacguacug

SEQ ID NO: 2382 - RNA, 17 nt, Homo sapiens
cagaacacgguacugcg

SEQ ID NO: 2383 - RNA, 17 nt, Homo sapiens
gaacacguaacugcgug

SEQ ID NO: 2384 - RNA, 17 nt, Homo sapiens
cacguacuggcgugcgu

SEQ ID NO: 2385 - RNA, 17 nt, Homo sapiens
cguacugcggugcgucg

SEQ ID NO: 2386 - RNA, 17 nt, Homo sapiens
uacugcguggcgucggu

SEQ ID NO: 2387 - RNA, 17 nt, Homo sapiens
cugcgugcggucgguau

SEQ ID NO: 2388 - RNA, 17 nt, Homo sapiens
gugcgucggguaugccg

SEQ ID NO: 2389 - RNA, 17 nt, Homo sapiens
gcgucgguaaugccgug

SEQ ID NO: 2390 - RNA, 17 nt, Homo sapiens
gucgguauggccguggu

SEQ ID NO: 2391 - RNA, 17 nt, Homo sapiens
gguaugccgguggucca

SEQ ID NO: 2392 - RNA, 17 nt, Homo sapiens
augccguggguccagaa

SEQ ID NO: 2393 - RNA, 17 nt, Homo sapiens
uccagaagggccgccca

SEQ ID NO: 2394 - RNA, 17 nt, Homo sapiens
agaaggccggcccaugg

SEQ ID NO: 2395 - RNA, 17 nt, Homo sapiens
ggccgcccaaugggcac

SEQ ID NO: 2396 - RNA, 17 nt, Homo sapiens
gcccauggggcacgucc

SEQ ID NO: 2397 - RNA, 17 nt, Homo sapiens
ccaugggcaacguccgc

SEQ ID NO: 2398 - RNA, 17 nt, Homo sapiens
augggcacgguccgcaa

SEQ ID NO: 2399 - RNA, 17 nt, Homo sapiens
gcacguccggcaaggcc

SEQ ID NO: 2400 - RNA, 17 nt, Homo sapiens
uccgcaagggccuucaa

SEQ ID NO: 2401 - RNA, 17 nt, Homo sapiens
cuucaagaggccacguc

SEQ ID NO: 2402 - RNA, 17 nt, Homo sapiens
caagagccaacgucucu

SEQ ID NO: 2403 - RNA, 17 nt, Homo sapiens
agagccacggucucuac

SEQ ID NO: 2404 - RNA, 17 nt, Homo sapiens
acgucucuaaccuugac

SEQ ID NO: 2405 - RNA, 17 nt, Homo sapiens
cuaccuugaacagaccu

SEQ ID NO: 2406 - RNA, 17 nt, Homo sapiens
cuugacagaaccuccag

SEQ ID NO: 2407 - RNA, 17 nt, Homo sapiens
gaccuccaggccguaca

SEQ ID NO: 2408 - RNA, 17 nt, Homo sapiens
cuccagccgguacaugc

SEQ ID NO: 2409 - RNA, 17 nt, Homo sapiens
ccagccguaacaugcga

SEQ ID NO: 2410 - RNA, 17 nt, Homo sapiens
agccguacaaugcgaca

SEQ ID NO: 2411 - RNA, 17 nt, Homo sapiens
ccguacauggcgacagu

SEQ ID NO: 2412 - RNA, 17 nt, Homo sapiens
uacaugcgaacaguucg

SEQ ID NO: 2413 - RNA, 17 nt, Homo sapiens
augcgacagguucgugg

SEQ ID NO: 2414 - RNA, 17 nt, Homo sapiens
gacaguucgguggcuca

SEQ ID NO: 2415 - RNA, 17 nt, Homo sapiens
aguucgugggcucaccu

SEQ ID NO: 2416 - RNA, 17 nt, Homo sapiens
cguggcucaaccugcag

SEQ ID NO: 2417 - RNA, 17 nt, Homo sapiens
gcucaccuggcaggaga

SEQ ID NO: 2418 - RNA, 17 nt, Homo sapiens
ugcaggagaaccagccc

SEQ ID NO: 2419 - RNA, 17 nt, Homo sapiens
ggagaccaggcccgcug

SEQ ID NO: 2420 - RNA, 17 nt, Homo sapiens
accagcccggcugaggg

SEQ ID NO: 2421 - RNA, 17 nt, Homo sapiens
gcugagggaaugccguc

SEQ ID NO: 2422 - RNA, 17 nt, Homo sapiens
ugagggauggccgucgu

SEQ ID NO: 2423 - RNA, 17 nt, Homo sapiens
gggaugccggucgucau

SEQ ID NO: 2424 - RNA, 17 nt, Homo sapiens
augccgucggucaucga

SEQ ID NO: 2425 - RNA, 17 nt, Homo sapiens
ccgucgucaaucgagca

SEQ ID NO: 2426 - RNA, 17 nt, Homo sapiens
gucaucgaggcagagcu

SEQ ID NO: 2427 - RNA, 17 nt, Homo sapiens
cgagcagaggcuccucc

SEQ ID NO: 2428 - RNA, 17 nt, Homo sapiens
cucccugaaaugaggcc

SEQ ID NO: 2429 - RNA, 17 nt, Homo sapiens
ugaaugagggccagcag

SEQ ID NO: 2430 - RNA, 17 nt, Homo sapiens
ugaggccaggcaguggc

SEQ ID NO: 2431 - RNA, 17 nt, Homo sapiens
ggccagcagguggccuc

SEQ ID NO: 2432 - RNA, 17 nt, Homo sapiens
cagcagugggccucuuc

SEQ ID NO: 2433 - RNA, 17 nt, Homo sapiens
ccucuucgaacgucuuc

SEQ ID NO: 2434 - RNA, 17 nt, Homo sapiens
ucuucgacggucuuccu

SEQ ID NO: 2435 - RNA, 17 nt, Homo sapiens
gucuuccuaacgcuuca

SEQ ID NO: 2436 - RNA, 17 nt, Homo sapiens
cuuccuacggcuucaug

SEQ ID NO: 2437 - RNA, 17 nt, Homo sapiens
uacgcuucaaugugcca

SEQ ID NO: 2438 - RNA, 17 nt, Homo sapiens
cgcuucauggugccacc

SEQ ID NO: 2439 - RNA, 17 nt, Homo sapiens
cuucauguggccaccac

SEQ ID NO: 2440 - RNA, 17 nt, Homo sapiens
caugugccaaccacgcc

SEQ ID NO: 2441 - RNA, 17 nt, Homo sapiens
gugccaccaacgccgug

SEQ ID NO: 2442 - RNA, 17 nt, Homo sapiens
gccaccacggccgugcg

SEQ ID NO: 2443 - RNA, 17 nt, Homo sapiens
accacgccggugcgcau

SEQ ID NO: 2444 - RNA, 17 nt, Homo sapiens
cacgccguggcgcauca

SEQ ID NO: 2445 - RNA, 17 nt, Homo sapiens
cgccgugcggcaucagg

SEQ ID NO: 2446 - RNA, 17 nt, Homo sapiens
ccgugcgcaaucagggg

SEQ ID NO: 2447 - RNA, 17 nt, Homo sapiens
caucagggggcaagucc

SEQ ID NO: 2448 - RNA, 17 nt, Homo sapiens
aggggcaagguccuacg

SEQ ID NO: 2449 - RNA, 17 nt, Homo sapiens
caaguccuaacguccag

SEQ ID NO: 2450 - RNA, 17 nt, Homo sapiens
aguccuacgguccagug

SEQ ID NO: 2451 - RNA, 17 nt, Homo sapiens
uacguccaggugccagg

SEQ ID NO: 2452 - RNA, 17 nt, Homo sapiens
cguccaguggccagggg

SEQ ID NO: 2453 - RNA, 17 nt, Homo sapiens
gccaggggaaucccgca

SEQ ID NO: 2454 - RNA, 17 nt, Homo sapiens
gggaucccggcagggcu

SEQ ID NO: 2455 - RNA, 17 nt, Homo sapiens
cccgcaggggcuccauc

SEQ ID NO: 2456 - RNA, 17 nt, Homo sapiens
agggcuccaauccucuc

SEQ ID NO: 2457 - RNA, 17 nt, Homo sapiens
uccucuccaacgcugcu

SEQ ID NO: 2458 - RNA, 17 nt, Homo sapiens
cucuccacggcugcucu

SEQ ID NO: 2459 - RNA, 17 nt, Homo sapiens
uccacgcuggcucugca

SEQ ID NO: 2460 - RNA, 17 nt, Homo sapiens
gcugcucuggcagccug

SEQ ID NO: 2461 - RNA, 17 nt, Homo sapiens
gcucugcaggccugugc

SEQ ID NO: 2462 - RNA, 17 nt, Homo sapiens
ugcagccuggugcuacg

SEQ ID NO: 2463 - RNA, 17 nt, Homo sapiens
cagccuguggcuacggc

SEQ ID NO: 2464 - RNA, 17 nt, Homo sapiens
ccugugcuaacggcgac

SEQ ID NO: 2465 - RNA, 17 nt, Homo sapiens
gugcuacgggcgacaug

SEQ ID NO: 2466 - RNA, 17 nt, Homo sapiens
cuacggcgaacauggag

SEQ ID NO: 2467 - RNA, 17 nt, Homo sapiens
acggcgacaauggagaa

SEQ ID NO: 2468 - RNA, 17 nt, Homo sapiens
cauggagaaacaagcug

SEQ ID NO: 2469 - RNA, 17 nt, Homo sapiens
gagaacaaggcuguuug

SEQ ID NO: 2470 - RNA, 17 nt, Homo sapiens
aacaagcugguuugcgg

SEQ ID NO: 2471 - RNA, 17 nt, Homo sapiens
agcuguuuggcggggau

SEQ ID NO: 2472 - RNA, 17 nt, Homo sapiens
uugcggggaauucggcg

SEQ ID NO: 2473 - RNA, 17 nt, Homo sapiens
gggauucgggcgggacg

SEQ ID NO: 2474 - RNA, 17 nt, Homo sapiens
ucggcgggaacgggcug

SEQ ID NO: 2475 - RNA, 17 nt, Homo sapiens
cgggacggggcugcucc

SEQ ID NO: 2476 - RNA, 17 nt, Homo sapiens
gacgggcuggcuccugc

SEQ ID NO: 2477 - RNA, 17 nt, Homo sapiens
cugcuccuggcguuugg

SEQ ID NO: 2478 - RNA, 17 nt, Homo sapiens
gcuccugcgguuuggug

SEQ ID NO: 2479 - RNA, 17 nt, Homo sapiens
ugcguuuggguggauga

SEQ ID NO: 2480 - RNA, 17 nt, Homo sapiens
uuugguggaaugauuuc

SEQ ID NO: 2481 - RNA, 17 nt, Homo sapiens
gguggaugaauuucuug

SEQ ID NO: 2482 - RNA, 17 nt, Homo sapiens
gauuucuugguugguga

SEQ ID NO: 2483 - RNA, 17 nt, Homo sapiens
ucuuguugggugacacc

SEQ ID NO: 2484 - RNA, 17 nt, Homo sapiens
uguuggugaacaccuca

SEQ ID NO: 2485 - RNA, 17 nt, Homo sapiens
uuggugacaaccucacc

SEQ ID NO: 2486 - RNA, 17 nt, Homo sapiens
gacaccucaaccucacc

SEQ ID NO: 2487 - RNA, 17 nt, Homo sapiens
cucaccucaacccacgc

SEQ ID NO: 2488 - RNA, 17 nt, Homo sapiens
ccucacccaacgcgaaa

SEQ ID NO: 2489 - RNA, 17 nt, Homo sapiens
ucacccacggcgaaaac

SEQ ID NO: 2490 - RNA, 17 nt, Homo sapiens
acgcgaaaaaccuuccu

SEQ ID NO: 2491 - RNA, 17 nt, Homo sapiens
uccucaggaacccuggu

SEQ ID NO: 2492 - RNA, 17 nt, Homo sapiens
ggacccuggguccgagg

SEQ ID NO: 2493 - RNA, 17 nt, Homo sapiens
gguccgagggugucccu

SEQ ID NO: 2494 - RNA, 17 nt, Homo sapiens
uccgagguggucccuga

SEQ ID NO: 2495 - RNA, 17 nt, Homo sapiens
gucccugagguauggcu

SEQ ID NO: 2496 - RNA, 17 nt, Homo sapiens
cccugaguaauggcugc

SEQ ID NO: 2497 - RNA, 17 nt, Homo sapiens
ugaguaugggcugcgug

SEQ ID NO: 2498 - RNA, 17 nt, Homo sapiens
guauggcuggcguggug

SEQ ID NO: 2499 - RNA, 17 nt, Homo sapiens
auggcugcgguggugaa

SEQ ID NO: 2500 - RNA, 17 nt, Homo sapiens
gcugcgugggugaacuu

SEQ ID NO: 2501 - RNA, 17 nt, Homo sapiens
cguggugaaacuugcgg

SEQ ID NO: 2502 - RNA, 17 nt, Homo sapiens
gugaacuuggcggaaga

SEQ ID NO: 2503 - RNA, 17 nt, Homo sapiens
ugcggaagaacaguggu

SEQ ID NO: 2504 - RNA, 17 nt, Homo sapiens
ggaagacagguggugaa

SEQ ID NO: 2505 - RNA, 17 nt, Homo sapiens
agacagugggugaacuu

SEQ ID NO: 2506 - RNA, 17 nt, Homo sapiens
aguggugaaacuucccu

SEQ ID NO: 2507 - RNA, 17 nt, Homo sapiens
acuucccugguagaaga

SEQ ID NO: 2508 - RNA, 17 nt, Homo sapiens
uguagaagaacgaggcc

SEQ ID NO: 2509 - RNA, 17 nt, Homo sapiens
aagacgagggcccuggg

SEQ ID NO: 2510 - RNA, 17 nt, Homo sapiens
ggcccugggguggcacg

SEQ ID NO: 2511 - RNA, 17 nt, Homo sapiens
ccugggugggcacggcu

SEQ ID NO: 2512 - RNA, 17 nt, Homo sapiens
uggguggcaacggcuuu

SEQ ID NO: 2513 - RNA, 17 nt, Homo sapiens
guggcacgggcuuuugu

SEQ ID NO: 2514 - RNA, 17 nt, Homo sapiens
cggcuuuugguucagau

SEQ ID NO: 2515 - RNA, 17 nt, Homo sapiens
uuguucagaaugccggc

SEQ ID NO: 2516 - RNA, 17 nt, Homo sapiens
guucagauggccggccc

SEQ ID NO: 2517 - RNA, 17 nt, Homo sapiens
agaugccgggcccacgg

SEQ ID NO: 2518 - RNA, 17 nt, Homo sapiens
gccggcccaacggccua

SEQ ID NO: 2519 - RNA, 17 nt, Homo sapiens
ggcccacgggccuauuc

SEQ ID NO: 2520 - RNA, 17 nt, Homo sapiens
cacggccuaauuccccu

SEQ ID NO: 2521 - RNA, 17 nt, Homo sapiens
uuccccugggugcggcc

SEQ ID NO: 2522 - RNA, 17 nt, Homo sapiens
ccccugguggcggccug

SEQ ID NO: 2523 - RNA, 17 nt, Homo sapiens
cuggugcgggccugcug

SEQ ID NO: 2524 - RNA, 17 nt, Homo sapiens
ugcggccuggcugcugg

SEQ ID NO: 2525 - RNA, 17 nt, Homo sapiens
ggccugcuggcuggaua

SEQ ID NO: 2526 - RNA, 17 nt, Homo sapiens
gcugcuggaauacccgg

SEQ ID NO: 2527 - RNA, 17 nt, Homo sapiens
ugcuggauaacccggac

SEQ ID NO: 2528 - RNA, 17 nt, Homo sapiens
auacccggaacccugga

SEQ ID NO: 2529 - RNA, 17 nt, Homo sapiens
cccuggagggugcagag

SEQ ID NO: 2530 - RNA, 17 nt, Homo sapiens
cuggagguggcagagcg

SEQ ID NO: 2531 - RNA, 17 nt, Homo sapiens
ggugcagaggcgacuac

SEQ ID NO: 2532 - RNA, 17 nt, Homo sapiens
gcagagcgaacuacucc

SEQ ID NO: 2533 - RNA, 17 nt, Homo sapiens
gagcgacuaacuccagc

SEQ ID NO: 2534 - RNA, 17 nt, Homo sapiens
cuacuccaggcuaugcc

SEQ ID NO: 2535 - RNA, 17 nt, Homo sapiens
cuccagcuaaugcccgg

SEQ ID NO: 2536 - RNA, 17 nt, Homo sapiens
ccagcuauggcccggac

SEQ ID NO: 2537 - RNA, 17 nt, Homo sapiens
augcccggaaccuccau

SEQ ID NO: 2538 - RNA, 17 nt, Homo sapiens
ggaccuccaaucagagc

SEQ ID NO: 2539 - RNA, 17 nt, Homo sapiens
ccaucagaggccagucu

SEQ ID NO: 2540 - RNA, 17 nt, Homo sapiens
cagagccaggucucacc

SEQ ID NO: 2541 - RNA, 17 nt, Homo sapiens
ccagucucaaccuucaa

SEQ ID NO: 2542 - RNA, 17 nt, Homo sapiens
caccuucaaaccgcggc

SEQ ID NO: 2543 - RNA, 17 nt, Homo sapiens
cuucaaccggcggcuuc

SEQ ID NO: 2544 - RNA, 17 nt, Homo sapiens
caaccgcgggcuucaag

SEQ ID NO: 2545 - RNA, 17 nt, Homo sapiens
gcuucaagggcugggag

SEQ ID NO: 2546 - RNA, 17 nt, Homo sapiens
ugggaggaaacaugcgu

SEQ ID NO: 2547 - RNA, 17 nt, Homo sapiens
ggaggaacaaugcgucg

SEQ ID NO: 2548 - RNA, 17 nt, Homo sapiens
aggaacauggcgucgca

SEQ ID NO: 2549 - RNA, 17 nt, Homo sapiens
gaacaugcggucgcaaa

SEQ ID NO: 2550 - RNA, 17 nt, Homo sapiens
caugcgucggcaaacuc

SEQ ID NO: 2551 - RNA, 17 nt, Homo sapiens
cgucgcaaaacucuuug

SEQ ID NO: 2552 - RNA, 17 nt, Homo sapiens
ucuuugggggucuugcg

SEQ ID NO: 2553 - RNA, 17 nt, Homo sapiens
ggggucuuggcggcuga

SEQ ID NO: 2554 - RNA, 17 nt, Homo sapiens
gucuugcgggcugaagu

SEQ ID NO: 2555 - RNA, 17 nt, Homo sapiens
cggcugaaggugucaca

SEQ ID NO: 2556 - RNA, 17 nt, Homo sapiens
gcugaaguggucacagc

SEQ ID NO: 2557 - RNA, 17 nt, Homo sapiens
gaagugucaacagccug

SEQ ID NO: 2558 - RNA, 17 nt, Homo sapiens
gugucacaggccuguuu

SEQ ID NO: 2559 - RNA, 17 nt, Homo sapiens
cacagccugguuucugg

SEQ ID NO: 2560 - RNA, 17 nt, Homo sapiens
guuucuggaauuugcag

SEQ ID NO: 2561 - RNA, 17 nt, Homo sapiens
cuggauuuggcagguga

SEQ ID NO: 2562 - RNA, 17 nt, Homo sapiens
auuugcagggugaacag

SEQ ID NO: 2563 - RNA, 17 nt, Homo sapiens
gcaggugaaacagccuc

SEQ ID NO: 2564 - RNA, 17 nt, Homo sapiens
ggugaacaggccuccag

SEQ ID NO: 2565 - RNA, 17 nt, Homo sapiens
gccuccagaacggugug

SEQ ID NO: 2566 - RNA, 17 nt, Homo sapiens
uccagacgggugugcac

SEQ ID NO: 2567 - RNA, 17 nt, Homo sapiens
cagacgguggugcacca

SEQ ID NO: 2568 - RNA, 17 nt, Homo sapiens
gacgguguggcaccaac

SEQ ID NO: 2569 - RNA, 17 nt, Homo sapiens
cggugugcaaccaacau

SEQ ID NO: 2570 - RNA, 17 nt, Homo sapiens
gugcaccaaacaucuac

SEQ ID NO: 2571 - RNA, 17 nt, Homo sapiens
gcaccaacaaucuacaa

SEQ ID NO: 2572 - RNA, 17 nt, Homo sapiens
caacaucuaacaagauc

SEQ ID NO: 2573 - RNA, 17 nt, Homo sapiens
ucuacaagaauccuccu

SEQ ID NO: 2574 - RNA, 17 nt, Homo sapiens
auccuccuggcugcagg

SEQ ID NO: 2575 - RNA, 17 nt, Homo sapiens
cuccugcuggcaggcgu

SEQ ID NO: 2576 - RNA, 17 nt, Homo sapiens
ugcugcagggcguacag

SEQ ID NO: 2577 - RNA, 17 nt, Homo sapiens
cugcaggcgguacaggu

SEQ ID NO: 2578 - RNA, 17 nt, Homo sapiens
gcaggcguaacagguuu

SEQ ID NO: 2579 - RNA, 17 nt, Homo sapiens
gcguacaggguuucacg

SEQ ID NO: 2580 - RNA, 17 nt, Homo sapiens
cagguuucaacgcaugu

SEQ ID NO: 2581 - RNA, 17 nt, Homo sapiens
gguuucacggcaugugu

SEQ ID NO: 2582 - RNA, 17 nt, Homo sapiens
uuucacgcaaugugugc

SEQ ID NO: 2583 - RNA, 17 nt, Homo sapiens
ucacgcauggugugcug

SEQ ID NO: 2584 - RNA, 17 nt, Homo sapiens
acgcauguggugcugca

SEQ ID NO: 2585 - RNA, 17 nt, Homo sapiens
gcauguguggcugcagc

SEQ ID NO: 2586 - RNA, 17 nt, Homo sapiens
ugugugcuggcagcucc

SEQ ID NO: 2587 - RNA, 17 nt, Homo sapiens
gugcugcaggcucccau

SEQ ID NO: 2588 - RNA, 17 nt, Homo sapiens
cagcucccaauuucauc

SEQ ID NO: 2589 - RNA, 17 nt, Homo sapiens
cccauuucaaucagcaa

SEQ ID NO: 2590 - RNA, 17 nt, Homo sapiens
uuucaucaggcaaguuu

SEQ ID NO: 2591 - RNA, 17 nt, Homo sapiens
aucagcaagguuuggaa

SEQ ID NO: 2592 - RNA, 17 nt, Homo sapiens
uuggaagaaaccccaca

SEQ ID NO: 2593 - RNA, 17 nt, Homo sapiens
agaaccccaacauuuuu

SEQ ID NO: 2594 - RNA, 17 nt, Homo sapiens
aaccccacaauuuuucc

SEQ ID NO: 2595 - RNA, 17 nt, Homo sapiens
uuuuuccuggcgcguca

SEQ ID NO: 2596 - RNA, 17 nt, Homo sapiens
uuuccugcggcgucauc

SEQ ID NO: 2597 - RNA, 17 nt, Homo sapiens
uccugcgcggucaucuc

SEQ ID NO: 2598 - RNA, 17 nt, Homo sapiens
ugcgcgucaaucucuga

SEQ ID NO: 2599 - RNA, 17 nt, Homo sapiens
caucucugaacacggcc

SEQ ID NO: 2600 - RNA, 17 nt, Homo sapiens
ucucugacaacggccuc

SEQ ID NO: 2601 - RNA, 17 nt, Homo sapiens
cugacacgggccucccu

SEQ ID NO: 2602 - RNA, 17 nt, Homo sapiens
cucccucuggcuacucc

SEQ ID NO: 2603 - RNA, 17 nt, Homo sapiens
ccucugcuaacuccauc

SEQ ID NO: 2604 - RNA, 17 nt, Homo sapiens
gcuacuccaauccugaa

SEQ ID NO: 2605 - RNA, 17 nt, Homo sapiens
uccugaaaggccaagaa

SEQ ID NO: 2606 - RNA, 17 nt, Homo sapiens
agccaagaaacgcaggg

SEQ ID NO: 2607 - RNA, 17 nt, Homo sapiens
ccaagaacggcagggau

SEQ ID NO: 2608 - RNA, 17 nt, Homo sapiens
acgcagggaaugucgcu

SEQ ID NO: 2609 - RNA, 17 nt, Homo sapiens
gcagggauggucgcugg

SEQ ID NO: 2610 - RNA, 17 nt, Homo sapiens
gggaugucggcuggggg

SEQ ID NO: 2611 - RNA, 17 nt, Homo sapiens
cgcuggggggccaaggg

SEQ ID NO: 2612 - RNA, 17 nt, Homo sapiens
ggccaaggggcgccgcc

SEQ ID NO: 2613 - RNA, 17 nt, Homo sapiens
ccaagggcggccgccgg

SEQ ID NO: 2614 - RNA, 17 nt, Homo sapiens
agggcgccggccggccc

SEQ ID NO: 2615 - RNA, 17 nt, Homo sapiens
cgccgccgggcccucug

SEQ ID NO: 2616 - RNA, 17 nt, Homo sapiens
ggcccucuggcccuccg

SEQ ID NO: 2617 - RNA, 17 nt, Homo sapiens
ccuccgagggccgugca

SEQ ID NO: 2618 - RNA, 17 nt, Homo sapiens
ccgaggccggugcagug

SEQ ID NO: 2619 - RNA, 17 nt, Homo sapiens
gaggccguggcaguggc

SEQ ID NO: 2620 - RNA, 17 nt, Homo sapiens
gccgugcagguggcugu

SEQ ID NO: 2621 - RNA, 17 nt, Homo sapiens
gugcagugggcugugcc

SEQ ID NO: 2622 - RNA, 17 nt, Homo sapiens
caguggcuggugccacc

SEQ ID NO: 2623 - RNA, 17 nt, Homo sapiens
guggcuguggccaccaa

SEQ ID NO: 2624 - RNA, 17 nt, Homo sapiens
gcugugccaaccaagca

SEQ ID NO: 2625 - RNA, 17 nt, Homo sapiens
gccaccaaggcauuccu

SEQ ID NO: 2626 - RNA, 17 nt, Homo sapiens
caccaagcaauuccugc

SEQ ID NO: 2627 - RNA, 17 nt, Homo sapiens
gcauuccuggcucaagc

SEQ ID NO: 2628 - RNA, 17 nt, Homo sapiens
cugcucaaggcugacuc

SEQ ID NO: 2629 - RNA, 17 nt, Homo sapiens
ucaagcugaacucgaca

SEQ ID NO: 2630 - RNA, 17 nt, Homo sapiens
cugacucgaacaccgug

SEQ ID NO: 2631 - RNA, 17 nt, Homo sapiens
gacucgacaaccguguc

SEQ ID NO: 2632 - RNA, 17 nt, Homo sapiens
ucgacaccggugucacc

SEQ ID NO: 2633 - RNA, 17 nt, Homo sapiens
gacaccguggucaccua

SEQ ID NO: 2634 - RNA, 17 nt, Homo sapiens
accgugucaaccuacgu

SEQ ID NO: 2635 - RNA, 17 nt, Homo sapiens
ugucaccuaacgugcca

SEQ ID NO: 2636 - RNA, 17 nt, Homo sapiens
ucaccuacggugccacu

SEQ ID NO: 2637 - RNA, 17 nt, Homo sapiens
accuacguggccacucc

SEQ ID NO: 2638 - RNA, 17 nt, Homo sapiens
uacgugccaacuccugg

SEQ ID NO: 2639 - RNA, 17 nt, Homo sapiens
cuccugggggucacuca

SEQ ID NO: 2640 - RNA, 17 nt, Homo sapiens
cuggggucaacucagga

SEQ ID NO: 2641 - RNA, 17 nt, Homo sapiens
cacucaggaacagccca

SEQ ID NO: 2642 - RNA, 17 nt, Homo sapiens
ucaggacaggcccagac

SEQ ID NO: 2643 - RNA, 17 nt, Homo sapiens
cagcccagaacgcagcu

SEQ ID NO: 2644 - RNA, 17 nt, Homo sapiens
gcccagacggcagcuga

SEQ ID NO: 2645 - RNA, 17 nt, Homo sapiens
cagacgcaggcugaguc

SEQ ID NO: 2646 - RNA, 17 nt, Homo sapiens
gcagcugaggucggaag

SEQ ID NO: 2647 - RNA, 17 nt, Homo sapiens
agucggaaggcucccgg

SEQ ID NO: 2648 - RNA, 17 nt, Homo sapiens
ucccggggaacgacgcu

SEQ ID NO: 2649 - RNA, 17 nt, Homo sapiens
cggggacgaacgcugac

SEQ ID NO: 2650 - RNA, 17 nt, Homo sapiens
gggacgacggcugacug

SEQ ID NO: 2651 - RNA, 17 nt, Homo sapiens
cgacgcugaacugcccu

SEQ ID NO: 2652 - RNA, 17 nt, Homo sapiens
cgcugacuggcccugga

SEQ ID NO: 2653 - RNA, 17 nt, Homo sapiens
cccuggagggccgcagc

SEQ ID NO: 2654 - RNA, 17 nt, Homo sapiens
uggaggccggcagccaa

SEQ ID NO: 2655 - RNA, 17 nt, Homo sapiens
aggccgcaggccaaccc

SEQ ID NO: 2656 - RNA, 17 nt, Homo sapiens
cgcagccaaacccggca

SEQ ID NO: 2657 - RNA, 17 nt, Homo sapiens
ccaacccgggcacugcc

SEQ ID NO: 2658 - RNA, 17 nt, Homo sapiens
aacccggcaacugcccu

SEQ ID NO: 2659 - RNA, 17 nt, Homo sapiens
ccggcacuggcccucag

SEQ ID NO: 2660 - RNA, 17 nt, Homo sapiens
gcccucagaacuucaag

SEQ ID NO: 2661 - RNA, 17 nt, Homo sapiens
acuucaagaaccauccu

SEQ ID NO: 2662 - RNA, 17 nt, Homo sapiens
ucaagaccaauccugga

SEQ ID NO: 2663 - RNA, 17 nt, Homo sapiens
cauccuggaacugaugg

SEQ ID NO: 2664 - RNA, 17 nt, Homo sapiens
cuggacugaauggccac

SEQ ID NO: 2665 - RNA, 17 nt, Homo sapiens
gacugaugggccacccg

SEQ ID NO: 2666 - RNA, 17 nt, Homo sapiens
ugauggccaacccgccc

SEQ ID NO: 2667 - RNA, 17 nt, Homo sapiens
ggccacccggcccacag

SEQ ID NO: 2668 - RNA, 17 nt, Homo sapiens
acccgcccaacagccag

SEQ ID NO: 2669 - RNA, 17 nt, Homo sapiens
cgcccacaggccaggcc

SEQ ID NO: 2670 - RNA, 17 nt, Homo sapiens
acagccagggccgagag

SEQ ID NO: 2671 - RNA, 17 nt, Homo sapiens
ggccgagaggcagacac

SEQ ID NO: 2672 - RNA, 17 nt, Homo sapiens
gagagcagaacaccagc

SEQ ID NO: 2673 - RNA, 17 nt, Homo sapiens
gagcagacaaccagcag

SEQ ID NO: 2674 - RNA, 17 nt, Homo sapiens
agacaccaggcagcccu

SEQ ID NO: 2675 - RNA, 17 nt, Homo sapiens
caccagcaggcccuguc

SEQ ID NO: 2676 - RNA, 17 nt, Homo sapiens
gcagcccuggucacgcc

SEQ ID NO: 2677 - RNA, 17 nt, Homo sapiens
gcccugucaacgccggg

SEQ ID NO: 2678 - RNA, 17 nt, Homo sapiens
ccugucacggccgggcu

SEQ ID NO: 2679 - RNA, 17 nt, Homo sapiens
cacgccggggcucuacg

SEQ ID NO: 2680 - RNA, 17 nt, Homo sapiens
cgggcucuaacguccca

SEQ ID NO: 2681 - RNA, 17 nt, Homo sapiens
ggcucuacggucccagg

SEQ ID NO: 2682 - RNA, 17 nt, Homo sapiens
agggagggggcggccca

SEQ ID NO: 2683 - RNA, 17 nt, Homo sapiens
gaggggcgggcccacac

SEQ ID NO: 2684 - RNA, 17 nt, Homo sapiens
ggcggcccaacacccag

SEQ ID NO: 2685 - RNA, 17 nt, Homo sapiens
cggcccacaacccaggc

SEQ ID NO: 2686 - RNA, 17 nt, Homo sapiens
acacccagggcccgcac

SEQ ID NO: 2687 - RNA, 17 nt, Homo sapiens
ccaggcccggcaccgcu

SEQ ID NO: 2688 - RNA, 17 nt, Homo sapiens
aggcccgcaaccgcugg

SEQ ID NO: 2689 - RNA, 17 nt, Homo sapiens
cccgcaccggcugggag

SEQ ID NO: 2690 - RNA, 17 nt, Homo sapiens
cgcugggaggucugagg

SEQ ID NO: 2691 - RNA, 17 nt, Homo sapiens
agucugagggccugagu

SEQ ID NO: 2692 - RNA, 17 nt, Homo sapiens
aggccugaggugagugu

SEQ ID NO: 2693 - RNA, 17 nt, Homo sapiens
cugagugagguguuugg

SEQ ID NO: 2694 - RNA, 17 nt, Homo sapiens
gagugagugguuuggcc

SEQ ID NO: 2695 - RNA, 17 nt, Homo sapiens
aguguuugggccgaggc

SEQ ID NO: 2696 - RNA, 17 nt, Homo sapiens
uggccgagggccugcau

SEQ ID NO: 2697 - RNA, 17 nt, Homo sapiens
cgaggccuggcaugucc

SEQ ID NO: 2698 - RNA, 17 nt, Homo sapiens
aggccugcaauguccgg

SEQ ID NO: 2699 - RNA, 17 nt, Homo sapiens
gccugcaugguccggcu

SEQ ID NO: 2700 - RNA, 17 nt, Homo sapiens
cauguccgggcugaagg

SEQ ID NO: 2701 - RNA, 17 nt, Homo sapiens
ggcugaagggcugagug

SEQ ID NO: 2702 - RNA, 17 nt, Homo sapiens
aaggcugagguguccgg

SEQ ID NO: 2703 - RNA, 17 nt, Homo sapiens
ggcugagugguccggcu

SEQ ID NO: 2704 - RNA, 17 nt, Homo sapiens
aguguccgggcugaggc

SEQ ID NO: 2705 - RNA, 17 nt, Homo sapiens
cggcugagggccugagc

SEQ ID NO: 2706 - RNA, 17 nt, Homo sapiens
aggccugaggcgagugu

SEQ ID NO: 2707 - RNA, 17 nt, Homo sapiens
cugagcgagguguccag

SEQ ID NO: 2708 - RNA, 17 nt, Homo sapiens
gagcgagugguccagcc

SEQ ID NO: 2709 - RNA, 17 nt, Homo sapiens
aguguccaggccaaggg

SEQ ID NO: 2710 - RNA, 17 nt, Homo sapiens
agccaaggggcugagug

SEQ ID NO: 2711 - RNA, 17 nt, Homo sapiens
agggcugagguguccag

SEQ ID NO: 2712 - RNA, 17 nt, Homo sapiens
ggcugagugguccagca

SEQ ID NO: 2713 - RNA, 17 nt, Homo sapiens
aguguccaggcacaccu

SEQ ID NO: 2714 - RNA, 17 nt, Homo sapiens
uguccagcaacaccugc

SEQ ID NO: 2715 - RNA, 17 nt, Homo sapiens
uccagcacaaccugccg

SEQ ID NO: 2716 - RNA, 17 nt, Homo sapiens
gcacaccuggccgucuu

SEQ ID NO: 2717 - RNA, 17 nt, Homo sapiens
caccugccggucuucac

SEQ ID NO: 2718 - RNA, 17 nt, Homo sapiens
ccgucuucaacuucccc

SEQ ID NO: 2719 - RNA, 17 nt, Homo sapiens
acuuccccaacaggcug

SEQ ID NO: 2720 - RNA, 17 nt, Homo sapiens
ccccacagggcuggcgc

SEQ ID NO: 2721 - RNA, 17 nt, Homo sapiens
acaggcugggcgcucgg

SEQ ID NO: 2722 - RNA, 17 nt, Homo sapiens
aggcuggcggcucggcu

SEQ ID NO: 2723 - RNA, 17 nt, Homo sapiens
ggcgcucgggcuccacc

SEQ ID NO: 2724 - RNA, 17 nt, Homo sapiens
ucggcuccaaccccagg

SEQ ID NO: 2725 - RNA, 17 nt, Homo sapiens
accccaggggccagcuu

SEQ ID NO: 2726 - RNA, 17 nt, Homo sapiens
cagggccaggcuuuucc

SEQ ID NO: 2727 - RNA, 17 nt, Homo sapiens
uuuuccucaaccaggag

SEQ ID NO: 2728 - RNA, 17 nt, Homo sapiens
caccaggaggcccggcu

SEQ ID NO: 2729 - RNA, 17 nt, Homo sapiens
ggagcccgggcuuccac

SEQ ID NO: 2730 - RNA, 17 nt, Homo sapiens
cggcuuccaacucccca

SEQ ID NO: 2731 - RNA, 17 nt, Homo sapiens
cacuccccaacauagga

SEQ ID NO: 2732 - RNA, 17 nt, Homo sapiens
cuccccacaauaggaau

SEQ ID NO: 2733 - RNA, 17 nt, Homo sapiens
acauaggaaauagucca

SEQ ID NO: 2734 - RNA, 17 nt, Homo sapiens
uaggaauagguccaucc

SEQ ID NO: 2735 - RNA, 17 nt, Homo sapiens
aauaguccaauccccag

SEQ ID NO: 2736 - RNA, 17 nt, Homo sapiens
auccccagaauucgcca

SEQ ID NO: 2737 - RNA, 17 nt, Homo sapiens
ccagauucggccauugu

SEQ ID NO: 2738 - RNA, 17 nt, Homo sapiens
gauucgccaauuguuca

SEQ ID NO: 2739 - RNA, 17 nt, Homo sapiens
ucgccauugguucaccc

SEQ ID NO: 2740 - RNA, 17 nt, Homo sapiens
cauuguucaaccccucg

SEQ ID NO: 2741 - RNA, 17 nt, Homo sapiens
caccccucggcccugcc

SEQ ID NO: 2742 - RNA, 17 nt, Homo sapiens
cucgcccuggcccuccu

SEQ ID NO: 2743 - RNA, 17 nt, Homo sapiens
ccuccuuuggccuucca

SEQ ID NO: 2744 - RNA, 17 nt, Homo sapiens
ugccuuccaacccccac

SEQ ID NO: 2745 - RNA, 17 nt, Homo sapiens
ccacccccaaccaucca

SEQ ID NO: 2746 - RNA, 17 nt, Homo sapiens
cccccaccaauccaggu

SEQ ID NO: 2747 - RNA, 17 nt, Homo sapiens
ccauccaggguggagac

SEQ ID NO: 2748 - RNA, 17 nt, Homo sapiens
agguggagaacccugag

SEQ ID NO: 2749 - RNA, 17 nt, Homo sapiens
ugagaaggaacccuggg

SEQ ID NO: 2750 - RNA, 17 nt, Homo sapiens
cccugggaggcucuggg

SEQ ID NO: 2751 - RNA, 17 nt, Homo sapiens
cucugggaaauuuggag

SEQ ID NO: 2752 - RNA, 17 nt, Homo sapiens
aauuuggaggugaccaa

SEQ ID NO: 2753 - RNA, 17 nt, Homo sapiens
uuggagugaaccaaagg

SEQ ID NO: 2754 - RNA, 17 nt, Homo sapiens
gaccaaagggugugccc

SEQ ID NO: 2755 - RNA, 17 nt, Homo sapiens
ccaaagguggugcccug

SEQ ID NO: 2756 - RNA, 17 nt, Homo sapiens
aaagguguggcccugua

SEQ ID NO: 2757 - RNA, 17 nt, Homo sapiens
ugugcccugguacacag

SEQ ID NO: 2758 - RNA, 17 nt, Homo sapiens
ugcccuguaacacaggc

SEQ ID NO: 2759 - RNA, 17 nt, Homo sapiens
cccuguacaacaggcga

SEQ ID NO: 2760 - RNA, 17 nt, Homo sapiens
guacacagggcgaggac

SEQ ID NO: 2761 - RNA, 17 nt, Homo sapiens
aggcgaggaacccugca

SEQ ID NO: 2762 - RNA, 17 nt, Homo sapiens
aggacccuggcaccugg

SEQ ID NO: 2763 - RNA, 17 nt, Homo sapiens
gacccugcaaccuggau

SEQ ID NO: 2764 - RNA, 17 nt, Homo sapiens
gcaccuggaaugggggu

SEQ ID NO: 2765 - RNA, 17 nt, Homo sapiens
ggauggggggucccugu

SEQ ID NO: 2766 - RNA, 17 nt, Homo sapiens
gggucccugguggguca

SEQ ID NO: 2767 - RNA, 17 nt, Homo sapiens
cccuguggggucaaauu

SEQ ID NO: 2768 - RNA, 17 nt, Homo sapiens
ugggucaaaauuggggg

SEQ ID NO: 2769 - RNA, 17 nt, Homo sapiens
ggggggagggugcugug

SEQ ID NO: 2770 - RNA, 17 nt, Homo sapiens
ggggagguggcuguggg

SEQ ID NO: 2771 - RNA, 17 nt, Homo sapiens
gaggugcuggugggagu

SEQ ID NO: 2772 - RNA, 17 nt, Homo sapiens
cugugggagguaaaaua

SEQ ID NO: 2773 - RNA, 17 nt, Homo sapiens
ggaguaaaaauacugaa

SEQ ID NO: 2774 - RNA, 17 nt, Homo sapiens
aguaaaauaacugaaua

SEQ ID NO: 2775 - RNA, 17 nt, Homo sapiens
aauacugaaauauauga

SEQ ID NO: 2776 - RNA, 17 nt, Homo sapiens
uacugaauaauaugagu

SEQ ID NO: 2777 - RNA, 17 nt, Homo sapiens
cugaauauaaugaguuu

SEQ ID NO: 2778 - RNA, 17 nt, Homo sapiens
auauaugagguuuuuca

SEQ ID NO: 2779 - RNA, 17 nt, Homo sapiens
guuuuucagguuuugaa

SEQ ID NO: 2780 - RNA, 38 nt, Artificial Sequence
  Description of Artificial Sequence:  Enzymatic Nucleic Acid
cgcagcagcugaugaggccguuaggccgaaacgcagcg

SEQ ID NO: 2781 - RNA, 38 nt, Artificial Sequence
  Description of Artificial Sequence:  Enzymatic Nucleic Acid
gcagcgggcugaugaggccguuaggccgaaagcgcgcg

SEQ ID NO: 2782 - RNA, 38 nt, Artificial Sequence
  Description of Artificial Sequence:  Enzymatic Nucleic Acid
gcagcaggcugaugaggccguuaggccgaaagcgcacg

SEQ ID NO: 2783 - RNA, 38 nt, Artificial Sequence
  Description of Artificial Sequence:  Enzymatic Nucleic Acid
ccucgcggcugaugaggccguuaggccgaaaguggcug

SEQ ID NO: 2784 - RNA, 38 nt, Artificial Sequence
  Description of Artificial Sequence:  Enzymatic Nucleic Acid
gccgcacgcugaugaggccguuaggccgaaacguggcc

SEQ ID NO: 2785 - RNA, 38 nt, Artificial Sequence
  Description of Artificial Sequence:  Enzymatic Nucleic Acid
cgccgcaccugaugaggccguuaggccgaaaacguggc

SEQ ID NO: 2786 - RNA, 38 nt, Artificial Sequence
  Description of Artificial Sequence:  Enzymatic Nucleic Acid
cgcgcggacugaugaggccguuaggccgaaagccgccg

SEQ ID NO: 2787 - RNA, 38 nt, Artificial Sequence
  Description of Artificial Sequence:  Enzymatic Nucleic Acid
gcgcgcggcugaugaggccguuaggccgaaaagccgcc

SEQ ID NO: 2788 - RNA, 38 nt, Artificial Sequence
  Description of Artificial Sequence:  Enzymatic Nucleic Acid
agcgcgcgcugaugaggccguuaggccgaaaaagccgc

SEQ ID NO: 2789 - RNA, 38 nt, Artificial Sequence
  Description of Artificial Sequence:  Enzymatic Nucleic Acid
ggcggaagcugaugaggccguuaggccgaaagggggcg

SEQ ID NO: 2790 - RNA, 38 nt, Artificial Sequence
  Description of Artificial Sequence:  Enzymatic Nucleic Acid
ccuggcggcugaugaggccguuaggccgaaaggagggg

SEQ ID NO: 2791 - RNA, 38 nt, Artificial Sequence
  Description of Artificial Sequence:  Enzymatic Nucleic Acid
accuggcgcugaugaggccguuaggccgaaaaggaggg

SEQ ID NO: 2792 - RNA, 38 nt, Artificial Sequence
  Description of Artificial Sequence:  Enzymatic Nucleic Acid
ucaggcagcugaugaggccguuaggccgaaacaccugg

SEQ ID NO: 2793 - RNA, 38 nt, Artificial Sequence
  Description of Artificial Sequence:  Enzymatic Nucleic Acid
cgaagccgcugaugaggccguuaggccgaaaggccagc

SEQ ID NO: 2794 - RNA, 38 nt, Artificial Sequence
  Description of Artificial Sequence:  Enzymatic Nucleic Acid
gcgaagcccugaugaggccguuaggccgaaaaggccag

SEQ ID NO: 2795 - RNA, 38 nt, Artificial Sequence
  Description of Artificial Sequence:  Enzymatic Nucleic Acid
gcagcgcgcugaugaggccguuaggccgaaagccgaag

SEQ ID NO: 2796 - RNA, 38 nt, Artificial Sequence
  Description of Artificial Sequence:  Enzymatic Nucleic Acid
agcagcgccugaugaggccguuaggccgaaaagccgaa

SEQ ID NO: 2797 - RNA, 38 nt, Artificial Sequence
  Description of Artificial Sequence:  Enzymatic Nucleic Acid
ugguggugcugaugaggccguuaggccgaaaggccucg

SEQ ID NO: 2798 - RNA, 38 nt, Artificial Sequence
  Description of Artificial Sequence:  Enzymatic Nucleic Acid
cugguggucugaugaggccguuaggccgaaaaggccuc

SEQ ID NO: 2799 - RNA, 38 nt, Artificial Sequence
  Description of Artificial Sequence:  Enzymatic Nucleic Acid
ugggcaggcugaugaggccguuaggccgaaagcugcgc

SEQ ID NO: 2800 - RNA, 38 nt, Artificial Sequence
  Description of Artificial Sequence:  Enzymatic Nucleic Acid
agcaggugcugaugaggccguuaggccgaaaccagcac

SEQ ID NO: 2801 - RNA, 38 nt, Artificial Sequence
  Description of Artificial Sequence:  Enzymatic Nucleic Acid
cagcaggucugaugaggccguuaggccgaaaaccagca

SEQ ID NO: 2802 - RNA, 38 nt, Artificial Sequence
  Description of Artificial Sequence:  Enzymatic Nucleic Acid
agcacaaacugaugaggccguuaggccgaaagcgcgca

SEQ ID NO: 2803 - RNA, 38 nt, Artificial Sequence
  Description of Artificial Sequence:  Enzymatic Nucleic Acid
ccagcacacugaugaggccguuaggccgaaagagcgcg

SEQ ID NO: 2804 - RNA, 38 nt, Artificial Sequence
  Description of Artificial Sequence:  Enzymatic Nucleic Acid
accagcaccugaugaggccguuaggccgaaaagagcgc

SEQ ID NO: 2805 - RNA, 38 nt, Artificial Sequence
  Description of Artificial Sequence:  Enzymatic Nucleic Acid
gcagcuggcugaugaggccguuaggccgaaagccacca

SEQ ID NO: 2806 - RNA, 38 nt, Artificial Sequence
  Description of Artificial Sequence:  Enzymatic Nucleic Acid
acaccuggcugaugaggccguuaggccgaaaggcgcag

SEQ ID NO: 2807 - RNA, 38 nt, Artificial Sequence
  Description of Artificial Sequence:  Enzymatic Nucleic Acid
cgagcuggcugaugaggccguuaggccgaaacagcggc

SEQ ID NO: 2808 - RNA, 38 nt, Artificial Sequence
  Description of Artificial Sequence:  Enzymatic Nucleic Acid
gcagcgcccugaugaggccguuaggccgaaagcuggua

SEQ ID NO: 2809 - RNA, 38 nt, Artificial Sequence
  Description of Artificial Sequence:  Enzymatic Nucleic Acid
ccgggccucugaugaggccguuaggccgaaaguggcag

SEQ ID NO: 2810 - RNA, 38 nt, Artificial Sequence
  Description of Artificial Sequence:  Enzymatic Nucleic Acid
ggguccaccugaugaggccguuaggccgaaagcgugug

SEQ ID NO: 2811 - RNA, 38 nt, Artificial Sequence
  Description of Artificial Sequence:  Enzymatic Nucleic Acid
gcaucccacugaugaggccguuaggccgaaacgccuuc

SEQ ID NO: 2812 - RNA, 38 nt, Artificial Sequence
  Description of Artificial Sequence:  Enzymatic Nucleic Acid
ccugacgccugaugaggccguuaggccgaaaugguucc

SEQ ID NO: 2813 - RNA, 38 nt, Artificial Sequence
  Description of Artificial Sequence:  Enzymatic Nucleic Acid
gccucccucugaugaggccguuaggccgaaacgcuaug

SEQ ID NO: 2814 - RNA, 38 nt, Artificial Sequence
  Description of Artificial Sequence:  Enzymatic Nucleic Acid
cccaggggcugaugaggccguuaggccgaaaccccggc

SEQ ID NO: 2815 - RNA, 38 nt, Artificial Sequence
  Description of Artificial Sequence:  Enzymatic Nucleic Acid
caacggcacugaugaggccguuaggccgaaacuucggc

SEQ ID NO: 2816 - RNA, 38 nt, Artificial Sequence
  Description of Artificial Sequence:  Enzymatic Nucleic Acid
ucuugggccugaugaggccguuaggccgaaacggcaga

SEQ ID NO: 2817 - RNA, 38 nt, Artificial Sequence
  Description of Artificial Sequence:  Enzymatic Nucleic Acid
cccugccccugaugaggccguuaggccgaaacgggcgu

SEQ ID NO: 2818 - RNA, 38 nt, Artificial Sequence
  Description of Artificial Sequence:  Enzymatic Nucleic Acid
gggcccagcugaugaggccguuaggccgaaaccccugc

SEQ ID NO: 2819 - RNA, 38 nt, Artificial Sequence
  Description of Artificial Sequence:  Enzymatic Nucleic Acid
cacacagacugaugaggccguuaggccgaaaccacggu

SEQ ID NO: 2820 - RNA, 38 nt, Artificial Sequence
  Description of Artificial Sequence:  Enzymatic Nucleic Acid
ccacacagcugaugaggccguuaggccgaaaaccacgg

SEQ ID NO: 2821 - RNA, 38 nt, Artificial Sequence
  Description of Artificial Sequence:  Enzymatic Nucleic Acid
accacacacugaugaggccguuaggccgaaaaaccacg

SEQ ID NO: 2822 - RNA, 38 nt, Artificial Sequence
  Description of Artificial Sequence:  Enzymatic Nucleic Acid
uggcaggucugaugaggccguuaggccgaaacaccaca

SEQ ID NO: 2823 - RNA, 38 nt, Artificial Sequence
  Description of Artificial Sequence:  Enzymatic Nucleic Acid
ccuccaaacugaugaggccguuaggccgaaagguggcu

SEQ ID NO: 2824 - RNA, 38 nt, Artificial Sequence
  Description of Artificial Sequence:  Enzymatic Nucleic Acid
acccuccacugaugaggccguuaggccgaaagaggugg

SEQ ID NO: 2825 - RNA, 38 nt, Artificial Sequence
  Description of Artificial Sequence:  Enzymatic Nucleic Acid
cacccucccugaugaggccguuaggccgaaaagaggug

SEQ ID NO: 2826 - RNA, 38 nt, Artificial Sequence
  Description of Artificial Sequence:  Enzymatic Nucleic Acid
gugccagacugaugaggccguuaggccgaaagcgcacc

SEQ ID NO: 2827 - RNA, 38 nt, Artificial Sequence
  Description of Artificial Sequence:  Enzymatic Nucleic Acid
gcgugccacugaugaggccguuaggccgaaagagcgca

SEQ ID NO: 2828 - RNA, 38 nt, Artificial Sequence
  Description of Artificial Sequence:  Enzymatic Nucleic Acid
auggguggcugaugaggccguuaggccgaaaguggcgc

SEQ ID NO: 2829 - RNA, 38 nt, Artificial Sequence
  Description of Artificial Sequence:  Enzymatic Nucleic Acid
ggcccacgcugaugaggccguuaggccgaaaugggugg

SEQ ID NO: 2830 - RNA, 38 nt, Artificial Sequence
  Description of Artificial Sequence:  Enzymatic Nucleic Acid
gcgaugugcugaugaggccguuaggccgaaaugggggg

SEQ ID NO: 2831 - RNA, 38 nt, Artificial Sequence
  Description of Artificial Sequence:  Enzymatic Nucleic Acid
guggccgccugaugaggccguuaggccgaaauguggau

SEQ ID NO: 2832 - RNA, 38 nt, Artificial Sequence
  Description of Artificial Sequence:  Enzymatic Nucleic Acid
gucccaggcugaugaggccguuaggccgaaacguggug

SEQ ID NO: 2833 - RNA, 38 nt, Artificial Sequence
  Description of Artificial Sequence:  Enzymatic Nucleic Acid
cgggggaccugaugaggccguuaggccgaaaggcgugu

SEQ ID NO: 2834 - RNA, 38 nt, Artificial Sequence
  Description of Artificial Sequence:  Enzymatic Nucleic Acid
caccggggcugaugaggccguuaggccgaaacaaggcg

SEQ ID NO: 2835 - RNA, 38 nt, Artificial Sequence
  Description of Artificial Sequence:  Enzymatic Nucleic Acid
ucucggcgcugaugaggccguuaggccgaaacaccggg

SEQ ID NO: 2836 - RNA, 38 nt, Artificial Sequence
  Description of Artificial Sequence:  Enzymatic Nucleic Acid
aguagaggcugaugaggccguuaggccgaaagugcuug

SEQ ID NO: 2837 - RNA, 38 nt, Artificial Sequence
  Description of Artificial Sequence:  Enzymatic Nucleic Acid
gaguagagcugaugaggccguuaggccgaaaagugcuu

SEQ ID NO: 2838 - RNA, 38 nt, Artificial Sequence
  Description of Artificial Sequence:  Enzymatic Nucleic Acid
gaggaguacugaugaggccguuaggccgaaaggaagug

SEQ ID NO: 2839 - RNA, 38 nt, Artificial Sequence
  Description of Artificial Sequence:  Enzymatic Nucleic Acid
cugaggagcugaugaggccguuaggccgaaagaggaag

SEQ ID NO: 2840 - RNA, 38 nt, Artificial Sequence
  Description of Artificial Sequence:  Enzymatic Nucleic Acid
cgccugagcugaugaggccguuaggccgaaaguagagg

SEQ ID NO: 2841 - RNA, 38 nt, Artificial Sequence
  Description of Artificial Sequence:  Enzymatic Nucleic Acid
ugucgccucugaugaggccguuaggccgaaaggaguag

SEQ ID NO: 2842 - RNA, 38 nt, Artificial Sequence
  Description of Artificial Sequence:  Enzymatic Nucleic Acid
guaggaagcugaugaggccguuaggccgaaagggccgc

SEQ ID NO: 2843 - RNA, 38 nt, Artificial Sequence
  Description of Artificial Sequence:  Enzymatic Nucleic Acid
ugaguaggcugaugaggccguuaggccgaaaggagggc

SEQ ID NO: 2844 - RNA, 38 nt, Artificial Sequence
  Description of Artificial Sequence:  Enzymatic Nucleic Acid
cugaguagcugaugaggccguuaggccgaaaaggaggg

SEQ ID NO: 2845 - RNA, 38 nt, Artificial Sequence
  Description of Artificial Sequence:  Enzymatic Nucleic Acid
gagcugagcugaugaggccguuaggccgaaaggaagga

SEQ ID NO: 2846 - RNA, 38 nt, Artificial Sequence
  Description of Artificial Sequence:  Enzymatic Nucleic Acid
agagagcucugaugaggccguuaggccgaaaguaggaa

SEQ ID NO: 2847 - RNA, 38 nt, Artificial Sequence
  Description of Artificial Sequence:  Enzymatic Nucleic Acid
gccucagacugaugaggccguuaggccgaaagcugagu

SEQ ID NO: 2848 - RNA, 38 nt, Artificial Sequence
  Description of Artificial Sequence:  Enzymatic Nucleic Acid
gggccucacugaugaggccguuaggccgaaagagcuga

SEQ ID NO: 2849 - RNA, 38 nt, Artificial Sequence
  Description of Artificial Sequence:  Enzymatic Nucleic Acid
gagccucccugaugaggccguuaggccgaaagcgccag

SEQ ID NO: 2850 - RNA, 38 nt, Artificial Sequence
  Description of Artificial Sequence:  Enzymatic Nucleic Acid
gucuccaccugaugaggccguuaggccgaaagccuccg

SEQ ID NO: 2851 - RNA, 38 nt, Artificial Sequence
  Description of Artificial Sequence:  Enzymatic Nucleic Acid
cccagaaacugaugaggccguuaggccgaaauggucuc

SEQ ID NO: 2852 - RNA, 38 nt, Artificial Sequence
  Description of Artificial Sequence:  Enzymatic Nucleic Acid
aacccagacugaugaggccguuaggccgaaagaugguc

SEQ ID NO: 2853 - RNA, 38 nt, Artificial Sequence
  Description of Artificial Sequence:  Enzymatic Nucleic Acid
gaacccagcugaugaggccguuaggccgaaaagauggu

SEQ ID NO: 2854 - RNA, 38 nt, Artificial Sequence
  Description of Artificial Sequence:  Enzymatic Nucleic Acid
ggaacccacugaugaggccguuaggccgaaaaagaugg

SEQ ID NO: 2855 - RNA, 38 nt, Artificial Sequence
  Description of Artificial Sequence:  Enzymatic Nucleic Acid
gggccuggcugaugaggccguuaggccgaaacccagaa

SEQ ID NO: 2856 - RNA, 38 nt, Artificial Sequence
  Description of Artificial Sequence:  Enzymatic Nucleic Acid
agggccugcugaugaggccguuaggccgaaaacccaga

SEQ ID NO: 2857 - RNA, 38 nt, Artificial Sequence
  Description of Artificial Sequence:  Enzymatic Nucleic Acid
ccugcgggcugaugaggccguuaggccgaaagucccug

SEQ ID NO: 2858 - RNA, 38 nt, Artificial Sequence
  Description of Artificial Sequence:  Enzymatic Nucleic Acid
ggcggggccugaugaggccguuaggccgaaaccugcgg

SEQ ID NO: 2859 - RNA, 38 nt, Artificial Sequence
  Description of Artificial Sequence:  Enzymatic Nucleic Acid
uuugccagcugaugaggccguuaggccgaaagcgcugg

SEQ ID NO: 2860 - RNA, 38 nt, Artificial Sequence
  Description of Artificial Sequence:  Enzymatic Nucleic Acid
gcuccagacugaugaggccguuaggccgaaacaggggc

SEQ ID NO: 2861 - RNA, 38 nt, Artificial Sequence
  Description of Artificial Sequence:  Enzymatic Nucleic Acid
agcuccagcugaugaggccguuaggccgaaaacagggg

SEQ ID NO: 2862 - RNA, 38 nt, Artificial Sequence
  Description of Artificial Sequence:  Enzymatic Nucleic Acid
cagcuccacugaugaggccguuaggccgaaaaacaggg

SEQ ID NO: 2863 - RNA, 38 nt, Artificial Sequence
  Description of Artificial Sequence:  Enzymatic Nucleic Acid
ugguuccccugaugaggccguuaggccgaaagcagcuc

SEQ ID NO: 2864 - RNA, 38 nt, Artificial Sequence
  Description of Artificial Sequence:  Enzymatic Nucleic Acid
gcaccccgcugaugaggccguuaggccgaaaggggcac

SEQ ID NO: 2865 - RNA, 38 nt, Artificial Sequence
  Description of Artificial Sequence:  Enzymatic Nucleic Acid
gucuugagcugaugaggccguuaggccgaaagcacccc

SEQ ID NO: 2866 - RNA, 38 nt, Artificial Sequence
  Description of Artificial Sequence:  Enzymatic Nucleic Acid
ugcgucuucugaugaggccguuaggccgaaaggagcac

SEQ ID NO: 2867 - RNA, 38 nt, Artificial Sequence
  Description of Artificial Sequence:  Enzymatic Nucleic Acid
gcuggggucugaugaggccguuaggccgaaaccgcagc

SEQ ID NO: 2868 - RNA, 38 nt, Artificial Sequence
  Description of Artificial Sequence:  Enzymatic Nucleic Acid
cgggcacacugaugaggccguuaggccgaaacaccggc

SEQ ID NO: 2869 - RNA, 38 nt, Artificial Sequence
  Description of Artificial Sequence:  Enzymatic Nucleic Acid
ccgccacacugaugaggccguuaggccgaaagcccugg

SEQ ID NO: 2870 - RNA, 38 nt, Artificial Sequence
  Description of Artificial Sequence:  Enzymatic Nucleic Acid
caccaggccugaugaggccguuaggccgaaacgggggu

SEQ ID NO: 2871 - RNA, 38 nt, Artificial Sequence
  Description of Artificial Sequence:  Enzymatic Nucleic Acid
ugcuggcgcugaugaggccguuaggccgaaagcagcug

SEQ ID NO: 2872 - RNA, 38 nt, Artificial Sequence
  Description of Artificial Sequence:  Enzymatic Nucleic Acid
cgaagccgcugaugaggccguuaggccgaaacaccugc

SEQ ID NO: 2873 - RNA, 38 nt, Artificial Sequence
  Description of Artificial Sequence:  Enzymatic Nucleic Acid
cccgcacgcugaugaggccguuaggccgaaagccguac

SEQ ID NO: 2874 - RNA, 38 nt, Artificial Sequence
  Description of Artificial Sequence:  Enzymatic Nucleic Acid
gcccgcaccugaugaggccguuaggccgaaaagccgua

SEQ ID NO: 2875 - RNA, 38 nt, Artificial Sequence
  Description of Artificial Sequence:  Enzymatic Nucleic Acid
gagccccacugaugaggccguuaggccgaaaggccugg

SEQ ID NO: 2876 - RNA, 38 nt, Artificial Sequence
  Description of Artificial Sequence:  Enzymatic Nucleic Acid
ugugccugcugaugaggccguuaggccgaaagccccag

SEQ ID NO: 2877 - RNA, 38 nt, Artificial Sequence
  Description of Artificial Sequence:  Enzymatic Nucleic Acid
uccugaggcugaugaggccguuaggccgaaagcggcgu

SEQ ID NO: 2878 - RNA, 38 nt, Artificial Sequence
  Description of Artificial Sequence:  Enzymatic Nucleic Acid
uuccugagcugaugaggccguuaggccgaaaagcggcg

SEQ ID NO: 2879 - RNA, 38 nt, Artificial Sequence
  Description of Artificial Sequence:  Enzymatic Nucleic Acid
guguuccucugaugaggccguuaggccgaaaggaagcg

SEQ ID NO: 2880 - RNA, 38 nt, Artificial Sequence
  Description of Artificial Sequence:  Enzymatic Nucleic Acid
gggagaugcugaugaggccguuaggccgaaacuucuug

SEQ ID NO: 2881 - RNA, 38 nt, Artificial Sequence
  Description of Artificial Sequence:  Enzymatic Nucleic Acid
agggagaucugaugaggccguuaggccgaaaacuucuu

SEQ ID NO: 2882 - RNA, 38 nt, Artificial Sequence
  Description of Artificial Sequence:  Enzymatic Nucleic Acid
cccagggacugaugaggccguuaggccgaaaugaacuu

SEQ ID NO: 2883 - RNA, 38 nt, Artificial Sequence
  Description of Artificial Sequence:  Enzymatic Nucleic Acid
uccccaggcugaugaggccguuaggccgaaagaugaac

SEQ ID NO: 2884 - RNA, 38 nt, Artificial Sequence
  Description of Artificial Sequence:  Enzymatic Nucleic Acid
ugcagcgacugaugaggccguuaggccgaaagcuuggc

SEQ ID NO: 2885 - RNA, 38 nt, Artificial Sequence
  Description of Artificial Sequence:  Enzymatic Nucleic Acid
ccugcagccugaugaggccguuaggccgaaagagcuug

SEQ ID NO: 2886 - RNA, 38 nt, Artificial Sequence
  Description of Artificial Sequence:  Enzymatic Nucleic Acid
gcgcagcccugaugaggccguuaggccgaaagcgcagu

SEQ ID NO: 2887 - RNA, 38 nt, Artificial Sequence
  Description of Artificial Sequence:  Enzymatic Nucleic Acid
acacagcccugaugaggccguuaggccgaaaccccugg

SEQ ID NO: 2888 - RNA, 38 nt, Artificial Sequence
  Description of Artificial Sequence:  Enzymatic Nucleic Acid
gcggccggcugaugaggccguuaggccgaaacacagcc

SEQ ID NO: 2889 - RNA, 38 nt, Artificial Sequence
  Description of Artificial Sequence:  Enzymatic Nucleic Acid
ugcggccgcugaugaggccguuaggccgaaaacacagc

SEQ ID NO: 2890 - RNA, 38 nt, Artificial Sequence
  Description of Artificial Sequence:  Enzymatic Nucleic Acid
cucacgcacugaugaggccguuaggccgaaacggugcu

SEQ ID NO: 2891 - RNA, 38 nt, Artificial Sequence
  Description of Artificial Sequence:  Enzymatic Nucleic Acid
uuggccagcugaugaggccguuaggccgaaaucuccuc

SEQ ID NO: 2892 - RNA, 38 nt, Artificial Sequence
  Description of Artificial Sequence:  Enzymatic Nucleic Acid
agugcaggcugaugaggccguuaggccgaaacuuggcc

SEQ ID NO: 2893 - RNA, 38 nt, Artificial Sequence
  Description of Artificial Sequence:  Enzymatic Nucleic Acid
cagugcagcugaugaggccguuaggccgaaaacuuggc

SEQ ID NO: 2894 - RNA, 38 nt, Artificial Sequence
  Description of Artificial Sequence:  Enzymatic Nucleic Acid
cgacgacgcugaugaggccguuaggccgaaacacacuc

SEQ ID NO: 2895 - RNA, 38 nt, Artificial Sequence
  Description of Artificial Sequence:  Enzymatic Nucleic Acid
agcucgaccugaugaggccguuaggccgaaacguacac

SEQ ID NO: 2896 - RNA, 38 nt, Artificial Sequence
  Description of Artificial Sequence:  Enzymatic Nucleic Acid
agcagcuccugaugaggccguuaggccgaaacgacgua

SEQ ID NO: 2897 - RNA, 38 nt, Artificial Sequence
  Description of Artificial Sequence:  Enzymatic Nucleic Acid
aaagaccucugaugaggccguuaggccgaaagcagcuc

SEQ ID NO: 2898 - RNA, 38 nt, Artificial Sequence
  Description of Artificial Sequence:  Enzymatic Nucleic Acid
aaaagaaacugaugaggccguuaggccgaaaccugagc

SEQ ID NO: 2899 - RNA, 38 nt, Artificial Sequence
  Description of Artificial Sequence:  Enzymatic Nucleic Acid
auaaaagacugaugaggccguuaggccgaaagaccuga

SEQ ID NO: 2900 - RNA, 38 nt, Artificial Sequence
  Description of Artificial Sequence:  Enzymatic Nucleic Acid
cauaaaagcugaugaggccguuaggccgaaaagaccug

SEQ ID NO: 2901 - RNA, 38 nt, Artificial Sequence
  Description of Artificial Sequence:  Enzymatic Nucleic Acid
acauaaaacugaugaggccguuaggccgaaaaagaccu

SEQ ID NO: 2902 - RNA, 38 nt, Artificial Sequence
  Description of Artificial Sequence:  Enzymatic Nucleic Acid
ugacauaacugaugaggccguuaggccgaaagaaagac

SEQ ID NO: 2903 - RNA, 38 nt, Artificial Sequence
  Description of Artificial Sequence:  Enzymatic Nucleic Acid
gugacauacugaugaggccguuaggccgaaaagaaaga

SEQ ID NO: 2904 - RNA, 38 nt, Artificial Sequence
  Description of Artificial Sequence:  Enzymatic Nucleic Acid
cgugacaucugaugaggccguuaggccgaaaaagaaag

SEQ ID NO: 2905 - RNA, 38 nt, Artificial Sequence
  Description of Artificial Sequence:  Enzymatic Nucleic Acid
ccgugacacugaugaggccguuaggccgaaaaaagaaa

SEQ ID NO: 2906 - RNA, 38 nt, Artificial Sequence
  Description of Artificial Sequence:  Enzymatic Nucleic Acid
gucuccgucugaugaggccguuaggccgaaacauaaaa

SEQ ID NO: 2907 - RNA, 38 nt, Artificial Sequence
  Description of Artificial Sequence:  Enzymatic Nucleic Acid
ucuuuugacugaugaggccguuaggccgaaacgugguc

SEQ ID NO: 2908 - RNA, 38 nt, Artificial Sequence
  Description of Artificial Sequence:  Enzymatic Nucleic Acid
uucuuuugcugaugaggccguuaggccgaaaacguggu

SEQ ID NO: 2909 - RNA, 38 nt, Artificial Sequence
  Description of Artificial Sequence:  Enzymatic Nucleic Acid
guucuuuucugaugaggccguuaggccgaaaaacgugg

SEQ ID NO: 2910 - RNA, 38 nt, Artificial Sequence
  Description of Artificial Sequence:  Enzymatic Nucleic Acid
uagaaaaacugaugaggccguuaggccgaaagccuguu

SEQ ID NO: 2911 - RNA, 38 nt, Artificial Sequence
  Description of Artificial Sequence:  Enzymatic Nucleic Acid
gguagaaacugaugaggccguuaggccgaaagagccug

SEQ ID NO: 2912 - RNA, 38 nt, Artificial Sequence
  Description of Artificial Sequence:  Enzymatic Nucleic Acid
cgguagaacugaugaggccguuaggccgaaaagagccu

SEQ ID NO: 2913 - RNA, 38 nt, Artificial Sequence
  Description of Artificial Sequence:  Enzymatic Nucleic Acid
ccgguagacugaugaggccguuaggccgaaaaagagcc

SEQ ID NO: 2914 - RNA, 38 nt, Artificial Sequence
  Description of Artificial Sequence:  Enzymatic Nucleic Acid
uccgguagcugaugaggccguuaggccgaaaaaagagc

SEQ ID NO: 2915 - RNA, 38 nt, Artificial Sequence
  Description of Artificial Sequence:  Enzymatic Nucleic Acid
uuccgguacugaugaggccguuaggccgaaaaaaagag

SEQ ID NO: 2916 - RNA, 38 nt, Artificial Sequence
  Description of Artificial Sequence:  Enzymatic Nucleic Acid
ucuuccggcugaugaggccguuaggccgaaagaaaaag

SEQ ID NO: 2917 - RNA, 38 nt, Artificial Sequence
  Description of Artificial Sequence:  Enzymatic Nucleic Acid
uugcuccacugaugaggccguuaggccgaaacacucuu

SEQ ID NO: 2918 - RNA, 38 nt, Artificial Sequence
  Description of Artificial Sequence:  Enzymatic Nucleic Acid
ugcuuugccugaugaggccguuaggccgaaacuugcuc

SEQ ID NO: 2919 - RNA, 38 nt, Artificial Sequence
  Description of Artificial Sequence:  Enzymatic Nucleic Acid
cugauucccugaugaggccguuaggccgaaaugcuuug

SEQ ID NO: 2920 - RNA, 38 nt, Artificial Sequence
  Description of Artificial Sequence:  Enzymatic Nucleic Acid
ugcugucucugaugaggccguuaggccgaaauuccaau

SEQ ID NO: 2921 - RNA, 38 nt, Artificial Sequence
  Description of Artificial Sequence:  Enzymatic Nucleic Acid
cccucuuccugaugaggccguuaggccgaaagugcugu

SEQ ID NO: 2922 - RNA, 38 nt, Artificial Sequence
  Description of Artificial Sequence:  Enzymatic Nucleic Acid
cugcuucccugaugaggccguuaggccgaaacagcucc

SEQ ID NO: 2923 - RNA, 38 nt, Artificial Sequence
  Description of Artificial Sequence:  Enzymatic Nucleic Acid
ugcugccucugaugaggccguuaggccgaaaccucugc

SEQ ID NO: 2924 - RNA, 38 nt, Artificial Sequence
  Description of Artificial Sequence:  Enzymatic Nucleic Acid
ggcuuccccugaugaggccguuaggccgaaaugcugcc

SEQ ID NO: 2925 - RNA, 38 nt, Artificial Sequence
  Description of Artificial Sequence:  Enzymatic Nucleic Acid
ggagucugcugaugaggccguuaggccgaaacgucagc

SEQ ID NO: 2926 - RNA, 38 nt, Artificial Sequence
  Description of Artificial Sequence:  Enzymatic Nucleic Acid
augaagcgcugaugaggccguuaggccgaaagucugga

SEQ ID NO: 2927 - RNA, 38 nt, Artificial Sequence
  Description of Artificial Sequence:  Enzymatic Nucleic Acid
uggggaugcugaugaggccguuaggccgaaagcggagu

SEQ ID NO: 2928 - RNA, 38 nt, Artificial Sequence
  Description of Artificial Sequence:  Enzymatic Nucleic Acid
uuggggaucugaugaggccguuaggccgaaaagcggag

SEQ ID NO: 2929 - RNA, 38 nt, Artificial Sequence
  Description of Artificial Sequence:  Enzymatic Nucleic Acid
ggcuugggcugaugaggccguuaggccgaaaugaagcg

SEQ ID NO: 2930 - RNA, 38 nt, Artificial Sequence
  Description of Artificial Sequence:  Enzymatic Nucleic Acid
auguucaccugaugaggccguuaggccgaaaucggccg

SEQ ID NO: 2931 - RNA, 38 nt, Artificial Sequence
  Description of Artificial Sequence:  Enzymatic Nucleic Acid
ccacgacgcugaugaggccguuaggccgaaaguccaug

SEQ ID NO: 2932 - RNA, 38 nt, Artificial Sequence
  Description of Artificial Sequence:  Enzymatic Nucleic Acid
gcucccaccugaugaggccguuaggccgaaacguaguc

SEQ ID NO: 2933 - RNA, 38 nt, Artificial Sequence
  Description of Artificial Sequence:  Enzymatic Nucleic Acid
cucugcggcugaugaggccguuaggccgaaacguucug

SEQ ID NO: 2934 - RNA, 38 nt, Artificial Sequence
  Description of Artificial Sequence:  Enzymatic Nucleic Acid
ucucugcgcugaugaggccguuaggccgaaaacguucu

SEQ ID NO: 2935 - RNA, 38 nt, Artificial Sequence
  Description of Artificial Sequence:  Enzymatic Nucleic Acid
cgaggugacugaugaggccguuaggccgaaacgcucgg

SEQ ID NO: 2936 - RNA, 38 nt, Artificial Sequence
  Description of Artificial Sequence:  Enzymatic Nucleic Acid
cucgaggucugaugaggccguuaggccgaaagacgcuc

SEQ ID NO: 2937 - RNA, 38 nt, Artificial Sequence
  Description of Artificial Sequence:  Enzymatic Nucleic Acid
ucacccuccugaugaggccguuaggccgaaaggugaga

SEQ ID NO: 2938 - RNA, 38 nt, Artificial Sequence
  Description of Artificial Sequence:  Enzymatic Nucleic Acid
gcacgcugcugaugaggccguuaggccgaaacagugcc

SEQ ID NO: 2939 - RNA, 38 nt, Artificial Sequence
  Description of Artificial Sequence:  Enzymatic Nucleic Acid
agcacgcucugaugaggccguuaggccgaaaacagugc

SEQ ID NO: 2940 - RNA, 38 nt, Artificial Sequence
  Description of Artificial Sequence:  Enzymatic Nucleic Acid
ucguaguucugaugaggccguuaggccgaaagcacgcu

SEQ ID NO: 2941 - RNA, 38 nt, Artificial Sequence
  Description of Artificial Sequence:  Enzymatic Nucleic Acid
cccgcucgcugaugaggccguuaggccgaaaguugagc

SEQ ID NO: 2942 - RNA, 38 nt, Artificial Sequence
  Description of Artificial Sequence:  Enzymatic Nucleic Acid
gcgcccagcugaugaggccguuaggccgaaaggccggg

SEQ ID NO: 2943 - RNA, 38 nt, Artificial Sequence
  Description of Artificial Sequence:  Enzymatic Nucleic Acid
ccagcacacugaugaggccguuaggccgaaaggcgccc

SEQ ID NO: 2944 - RNA, 38 nt, Artificial Sequence
  Description of Artificial Sequence:  Enzymatic Nucleic Acid
ccuguggacugaugaggccguuaggccgaaaucgucca

SEQ ID NO: 2945 - RNA, 38 nt, Artificial Sequence
  Description of Artificial Sequence:  Enzymatic Nucleic Acid
gcccugugcugaugaggccguuaggccgaaauaucguc

SEQ ID NO: 2946 - RNA, 38 nt, Artificial Sequence
  Description of Artificial Sequence:  Enzymatic Nucleic Acid
gcagcacgcugaugaggccguuaggccgaaaggugcgc

SEQ ID NO: 2947 - RNA, 38 nt, Artificial Sequence
  Description of Artificial Sequence:  Enzymatic Nucleic Acid
cgcagcaccugaugaggccguuaggccgaaaaggugcg

SEQ ID NO: 2948 - RNA, 38 nt, Artificial Sequence
  Description of Artificial Sequence:  Enzymatic Nucleic Acid
ugacaaagcugaugaggccguuaggccgaaacagcuca

SEQ ID NO: 2949 - RNA, 38 nt, Artificial Sequence
  Description of Artificial Sequence:  Enzymatic Nucleic Acid
ccuugacacugaugaggccguuaggccgaaaguacagc

SEQ ID NO: 2950 - RNA, 38 nt, Artificial Sequence
  Description of Artificial Sequence:  Enzymatic Nucleic Acid
accuugaccugaugaggccguuaggccgaaaaguacag

SEQ ID NO: 2951 - RNA, 38 nt, Artificial Sequence
  Description of Artificial Sequence:  Enzymatic Nucleic Acid
uccaccuucugaugaggccguuaggccgaaacaaagua

SEQ ID NO: 2952 - RNA, 38 nt, Artificial Sequence
  Description of Artificial Sequence:  Enzymatic Nucleic Acid
uggugucgcugaugaggccguuaggccgaaacgcgccc

SEQ ID NO: 2953 - RNA, 38 nt, Artificial Sequence
  Description of Artificial Sequence:  Enzymatic Nucleic Acid
uccuggggcugaugaggccguuaggccgaaaugguguc

SEQ ID NO: 2954 - RNA, 38 nt, Artificial Sequence
  Description of Artificial Sequence:  Enzymatic Nucleic Acid
accuccgucugaugaggccguuaggccgaaagccuguc

SEQ ID NO: 2955 - RNA, 38 nt, Artificial Sequence
  Description of Artificial Sequence:  Enzymatic Nucleic Acid
cuggcgaucugaugaggccguuaggccgaaaccuccgu

SEQ ID NO: 2956 - RNA, 38 nt, Artificial Sequence
  Description of Artificial Sequence:  Enzymatic Nucleic Acid
augcuggccugaugaggccguuaggccgaaaugaccuc

SEQ ID NO: 2957 - RNA, 38 nt, Artificial Sequence
  Description of Artificial Sequence:  Enzymatic Nucleic Acid
gguuugaucugaugaggccguuaggccgaaaugcuggc

SEQ ID NO: 2958 - RNA, 38 nt, Artificial Sequence
  Description of Artificial Sequence:  Enzymatic Nucleic Acid
ugggguuucugaugaggccguuaggccgaaaugaugcu

SEQ ID NO: 2959 - RNA, 38 nt, Artificial Sequence
  Description of Artificial Sequence:  Enzymatic Nucleic Acid
gcacgcagcugaugaggccguuaggccgaaacguguuc

SEQ ID NO: 2960 - RNA, 38 nt, Artificial Sequence
  Description of Artificial Sequence:  Enzymatic Nucleic Acid
ggcauacccugaugaggccguuaggccgaaacgcacgc

SEQ ID NO: 2961 - RNA, 38 nt, Artificial Sequence
  Description of Artificial Sequence:  Enzymatic Nucleic Acid
ccacggcacugaugaggccguuaggccgaaaccgacgc

SEQ ID NO: 2962 - RNA, 38 nt, Artificial Sequence
  Description of Artificial Sequence:  Enzymatic Nucleic Acid
gccuucugcugaugaggccguuaggccgaaaccacggc

SEQ ID NO: 2963 - RNA, 38 nt, Artificial Sequence
  Description of Artificial Sequence:  Enzymatic Nucleic Acid
gccuugcgcugaugaggccguuaggccgaaacgugccc

SEQ ID NO: 2964 - RNA, 38 nt, Artificial Sequence
  Description of Artificial Sequence:  Enzymatic Nucleic Acid
ggcucuugcugaugaggccguuaggccgaaaggccuug

SEQ ID NO: 2965 - RNA, 38 nt, Artificial Sequence
  Description of Artificial Sequence:  Enzymatic Nucleic Acid
uggcucuucugaugaggccguuaggccgaaaaggccuu

SEQ ID NO: 2966 - RNA, 38 nt, Artificial Sequence
  Description of Artificial Sequence:  Enzymatic Nucleic Acid
aagguagacugaugaggccguuaggccgaaacguggcu

SEQ ID NO: 2967 - RNA, 38 nt, Artificial Sequence
  Description of Artificial Sequence:  Enzymatic Nucleic Acid
ucaagguacugaugaggccguuaggccgaaagacgugg

SEQ ID NO: 2968 - RNA, 38 nt, Artificial Sequence
  Description of Artificial Sequence:  Enzymatic Nucleic Acid
ugucaaggcugaugaggccguuaggccgaaagagacgu

SEQ ID NO: 2969 - RNA, 38 nt, Artificial Sequence
  Description of Artificial Sequence:  Enzymatic Nucleic Acid
ggucuguccugaugaggccguuaggccgaaagguagag

SEQ ID NO: 2970 - RNA, 38 nt, Artificial Sequence
  Description of Artificial Sequence:  Enzymatic Nucleic Acid
uacggcugcugaugaggccguuaggccgaaaggucugu

SEQ ID NO: 2971 - RNA, 38 nt, Artificial Sequence
  Description of Artificial Sequence:  Enzymatic Nucleic Acid
gucgcaugcugaugaggccguuaggccgaaacggcugg

SEQ ID NO: 2972 - RNA, 38 nt, Artificial Sequence
  Description of Artificial Sequence:  Enzymatic Nucleic Acid
gagccacgcugaugaggccguuaggccgaaacugucgc

SEQ ID NO: 2973 - RNA, 38 nt, Artificial Sequence
  Description of Artificial Sequence:  Enzymatic Nucleic Acid
ugagccaccugaugaggccguuaggccgaaaacugucg

SEQ ID NO: 2974 - RNA, 38 nt, Artificial Sequence
  Description of Artificial Sequence:  Enzymatic Nucleic Acid
cugcaggucugaugaggccguuaggccgaaagccacga

SEQ ID NO: 2975 - RNA, 38 nt, Artificial Sequence
  Description of Artificial Sequence:  Enzymatic Nucleic Acid
ucgaugaccugaugaggccguuaggccgaaacggcauc

SEQ ID NO: 2976 - RNA, 38 nt, Artificial Sequence
  Description of Artificial Sequence:  Enzymatic Nucleic Acid
ugcucgaucugaugaggccguuaggccgaaacgacggc

SEQ ID NO: 2977 - RNA, 38 nt, Artificial Sequence
  Description of Artificial Sequence:  Enzymatic Nucleic Acid
cucugcuccugaugaggccguuaggccgaaaugacgac

SEQ ID NO: 2978 - RNA, 38 nt, Artificial Sequence
  Description of Artificial Sequence:  Enzymatic Nucleic Acid
ucagggagcugaugaggccguuaggccgaaagcucugc

SEQ ID NO: 2979 - RNA, 38 nt, Artificial Sequence
  Description of Artificial Sequence:  Enzymatic Nucleic Acid
cauucaggcugaugaggccguuaggccgaaaggagcuc

SEQ ID NO: 2980 - RNA, 38 nt, Artificial Sequence
  Description of Artificial Sequence:  Enzymatic Nucleic Acid
acgucgaacugaugaggccguuaggccgaaaggccacu

SEQ ID NO: 2981 - RNA, 38 nt, Artificial Sequence
  Description of Artificial Sequence:  Enzymatic Nucleic Acid
agacgucgcugaugaggccguuaggccgaaagaggcca

SEQ ID NO: 2982 - RNA, 38 nt, Artificial Sequence
  Description of Artificial Sequence:  Enzymatic Nucleic Acid
aagacguccugaugaggccguuaggccgaaaagaggcc

SEQ ID NO: 2983 - RNA, 38 nt, Artificial Sequence
  Description of Artificial Sequence:  Enzymatic Nucleic Acid
cguaggaacugaugaggccguuaggccgaaacgucgaa

SEQ ID NO: 2984 - RNA, 38 nt, Artificial Sequence
  Description of Artificial Sequence:  Enzymatic Nucleic Acid
agcguaggcugaugaggccguuaggccgaaagacgucg

SEQ ID NO: 2985 - RNA, 38 nt, Artificial Sequence
  Description of Artificial Sequence:  Enzymatic Nucleic Acid
aagcguagcugaugaggccguuaggccgaaaagacguc

SEQ ID NO: 2986 - RNA, 38 nt, Artificial Sequence
  Description of Artificial Sequence:  Enzymatic Nucleic Acid
augaagcgcugaugaggccguuaggccgaaaggaagac

SEQ ID NO: 2987 - RNA, 38 nt, Artificial Sequence
  Description of Artificial Sequence:  Enzymatic Nucleic Acid
ggcacaugcugaugaggccguuaggccgaaagcguagg

SEQ ID NO: 2988 - RNA, 38 nt, Artificial Sequence
  Description of Artificial Sequence:  Enzymatic Nucleic Acid
uggcacaucugaugaggccguuaggccgaaaagcguag

SEQ ID NO: 2989 - RNA, 38 nt, Artificial Sequence
  Description of Artificial Sequence:  Enzymatic Nucleic Acid
uugccccucugaugaggccguuaggccgaaaugcgcac

SEQ ID NO: 2990 - RNA, 38 nt, Artificial Sequence
  Description of Artificial Sequence:  Enzymatic Nucleic Acid
ggacguagcugaugaggccguuaggccgaaacuugccc

SEQ ID NO: 2991 - RNA, 38 nt, Artificial Sequence
  Description of Artificial Sequence:  Enzymatic Nucleic Acid
acuggacgcugaugaggccguuaggccgaaaggacuug

SEQ ID NO: 2992 - RNA, 38 nt, Artificial Sequence
  Description of Artificial Sequence:  Enzymatic Nucleic Acid
uggcacugcugaugaggccguuaggccgaaacguagga

SEQ ID NO: 2993 - RNA, 38 nt, Artificial Sequence
  Description of Artificial Sequence:  Enzymatic Nucleic Acid
cccugcggcugaugaggccguuaggccgaaauccccug

SEQ ID NO: 2994 - RNA, 38 nt, Artificial Sequence
  Description of Artificial Sequence:  Enzymatic Nucleic Acid
agaggaugcugaugaggccguuaggccgaaagcccugc

SEQ ID NO: 2995 - RNA, 38 nt, Artificial Sequence
  Description of Artificial Sequence:  Enzymatic Nucleic Acid
guggagagcugaugaggccguuaggccgaaauggagcc

SEQ ID NO: 2996 - RNA, 38 nt, Artificial Sequence
  Description of Artificial Sequence:  Enzymatic Nucleic Acid
agcguggacugaugaggccguuaggccgaaaggaugga

SEQ ID NO: 2997 - RNA, 38 nt, Artificial Sequence
  Description of Artificial Sequence:  Enzymatic Nucleic Acid
gcagcgugcugaugaggccguuaggccgaaagaggaug

SEQ ID NO: 2998 - RNA, 38 nt, Artificial Sequence
  Description of Artificial Sequence:  Enzymatic Nucleic Acid
aggcugcacugaugaggccguuaggccgaaagcagcgu

SEQ ID NO: 2999 - RNA, 38 nt, Artificial Sequence
  Description of Artificial Sequence:  Enzymatic Nucleic Acid
ugucgccgcugaugaggccguuaggccgaaagcacagg

SEQ ID NO: 3000 - RNA, 38 nt, Artificial Sequence
  Description of Artificial Sequence:  Enzymatic Nucleic Acid
uccccgcacugaugaggccguuaggccgaaacagcuug

SEQ ID NO: 3001 - RNA, 38 nt, Artificial Sequence
  Description of Artificial Sequence:  Enzymatic Nucleic Acid
auccccgccugaugaggccguuaggccgaaaacagcuu

SEQ ID NO: 3002 - RNA, 38 nt, Artificial Sequence
  Description of Artificial Sequence:  Enzymatic Nucleic Acid
ucccgccgcugaugaggccguuaggccgaaauccccgc

SEQ ID NO: 3003 - RNA, 38 nt, Artificial Sequence
  Description of Artificial Sequence:  Enzymatic Nucleic Acid
gucccgcccugaugaggccguuaggccgaaaauccccg

SEQ ID NO: 3004 - RNA, 38 nt, Artificial Sequence
  Description of Artificial Sequence:  Enzymatic Nucleic Acid
aaacgcagcugaugaggccguuaggccgaaagcagccc

SEQ ID NO: 3005 - RNA, 38 nt, Artificial Sequence
  Description of Artificial Sequence:  Enzymatic Nucleic Acid
auccaccacugaugaggccguuaggccgaaacgcagga

SEQ ID NO: 3006 - RNA, 38 nt, Artificial Sequence
  Description of Artificial Sequence:  Enzymatic Nucleic Acid
cauccacccugaugaggccguuaggccgaaaacgcagg

SEQ ID NO: 3007 - RNA, 38 nt, Artificial Sequence
  Description of Artificial Sequence:  Enzymatic Nucleic Acid
caacaagacugaugaggccguuaggccgaaaucaucca

SEQ ID NO: 3008 - RNA, 38 nt, Artificial Sequence
  Description of Artificial Sequence:  Enzymatic Nucleic Acid
ccaacaagcugaugaggccguuaggccgaaaaucaucc

SEQ ID NO: 3009 - RNA, 38 nt, Artificial Sequence
  Description of Artificial Sequence:  Enzymatic Nucleic Acid
accaacaacugaugaggccguuaggccgaaaaaucauc

SEQ ID NO: 3010 - RNA, 38 nt, Artificial Sequence
  Description of Artificial Sequence:  Enzymatic Nucleic Acid
ucaccaaccugaugaggccguuaggccgaaagaaauca

SEQ ID NO: 3011 - RNA, 38 nt, Artificial Sequence
  Description of Artificial Sequence:  Enzymatic Nucleic Acid
gugucacccugaugaggccguuaggccgaaacaagaaa

SEQ ID NO: 3012 - RNA, 38 nt, Artificial Sequence
  Description of Artificial Sequence:  Enzymatic Nucleic Acid
ggugaggucugaugaggccguuaggccgaaagguguca

SEQ ID NO: 3013 - RNA, 38 nt, Artificial Sequence
  Description of Artificial Sequence:  Enzymatic Nucleic Acid
gcgugggucugaugaggccguuaggccgaaaggugagg

SEQ ID NO: 3014 - RNA, 38 nt, Artificial Sequence
  Description of Artificial Sequence:  Enzymatic Nucleic Acid
uccugaggcugaugaggccguuaggccgaaagguuuuc

SEQ ID NO: 3015 - RNA, 38 nt, Artificial Sequence
  Description of Artificial Sequence:  Enzymatic Nucleic Acid
guccugagcugaugaggccguuaggccgaaaagguuuu

SEQ ID NO: 3016 - RNA, 38 nt, Artificial Sequence
  Description of Artificial Sequence:  Enzymatic Nucleic Acid
aggguccucugaugaggccguuaggccgaaaggaaggu

SEQ ID NO: 3017 - RNA, 38 nt, Artificial Sequence
  Description of Artificial Sequence:  Enzymatic Nucleic Acid
acaccucgcugaugaggccguuaggccgaaaccagggu

SEQ ID NO: 3018 - RNA, 38 nt, Artificial Sequence
  Description of Artificial Sequence:  Enzymatic Nucleic Acid
uacucaggcugaugaggccguuaggccgaaacaccucg

SEQ ID NO: 3019 - RNA, 38 nt, Artificial Sequence
  Description of Artificial Sequence:  Enzymatic Nucleic Acid
cgcagccacugaugaggccguuaggccgaaacucaggg

SEQ ID NO: 3020 - RNA, 38 nt, Artificial Sequence
  Description of Artificial Sequence:  Enzymatic Nucleic Acid
ucuuccgccugaugaggccguuaggccgaaaguucacc

SEQ ID NO: 3021 - RNA, 38 nt, Artificial Sequence
  Description of Artificial Sequence:  Enzymatic Nucleic Acid
cuacagggcugaugaggccguuaggccgaaaguucacc

SEQ ID NO: 3022 - RNA, 38 nt, Artificial Sequence
  Description of Artificial Sequence:  Enzymatic Nucleic Acid
ucuacaggcugaugaggccguuaggccgaaaaguucac

SEQ ID NO: 3023 - RNA, 38 nt, Artificial Sequence
  Description of Artificial Sequence:  Enzymatic Nucleic Acid
ucgucuuccugaugaggccguuaggccgaaacagggaa

SEQ ID NO: 3024 - RNA, 38 nt, Artificial Sequence
  Description of Artificial Sequence:  Enzymatic Nucleic Acid
cugaacaacugaugaggccguuaggccgaaagccgugc

SEQ ID NO: 3025 - RNA, 38 nt, Artificial Sequence
  Description of Artificial Sequence:  Enzymatic Nucleic Acid
ucugaacacugaugaggccguuaggccgaaaagccgug

SEQ ID NO: 3026 - RNA, 38 nt, Artificial Sequence
  Description of Artificial Sequence:  Enzymatic Nucleic Acid
aucugaaccugaugaggccguuaggccgaaaaagccgu

SEQ ID NO: 3027 - RNA, 38 nt, Artificial Sequence
  Description of Artificial Sequence:  Enzymatic Nucleic Acid
ggcaucugcugaugaggccguuaggccgaaacaaaagc

SEQ ID NO: 3028 - RNA, 38 nt, Artificial Sequence
  Description of Artificial Sequence:  Enzymatic Nucleic Acid
cggcaucucugaugaggccguuaggccgaaaacaaaag

SEQ ID NO: 3029 - RNA, 38 nt, Artificial Sequence
  Description of Artificial Sequence:  Enzymatic Nucleic Acid
caggggaacugaugaggccguuaggccgaaaggccgug

SEQ ID NO: 3030 - RNA, 38 nt, Artificial Sequence
  Description of Artificial Sequence:  Enzymatic Nucleic Acid
accaggggcugaugaggccguuaggccgaaauaggccg

SEQ ID NO: 3031 - RNA, 38 nt, Artificial Sequence
  Description of Artificial Sequence:  Enzymatic Nucleic Acid
caccagggcugaugaggccguuaggccgaaaauaggcc

SEQ ID NO: 3032 - RNA, 38 nt, Artificial Sequence
  Description of Artificial Sequence:  Enzymatic Nucleic Acid
gguccgggcugaugaggccguuaggccgaaauccagca

SEQ ID NO: 3033 - RNA, 38 nt, Artificial Sequence
  Description of Artificial Sequence:  Enzymatic Nucleic Acid
agcuggagcugaugaggccguuaggccgaaagucgcuc

SEQ ID NO: 3034 - RNA, 38 nt, Artificial Sequence
  Description of Artificial Sequence:  Enzymatic Nucleic Acid
cauagcugcugaugaggccguuaggccgaaaguagucg

SEQ ID NO: 3035 - RNA, 38 nt, Artificial Sequence
  Description of Artificial Sequence:  Enzymatic Nucleic Acid
uccgggcacugaugaggccguuaggccgaaagcuggag

SEQ ID NO: 3036 - RNA, 38 nt, Artificial Sequence
  Description of Artificial Sequence:  Enzymatic Nucleic Acid
cucugaugcugaugaggccguuaggccgaaagguccgg

SEQ ID NO: 3037 - RNA, 38 nt, Artificial Sequence
  Description of Artificial Sequence:  Enzymatic Nucleic Acid
cuggcucucugaugaggccguuaggccgaaauggaggu

SEQ ID NO: 3038 - RNA, 38 nt, Artificial Sequence
  Description of Artificial Sequence:  Enzymatic Nucleic Acid
gaaggugacugaugaggccguuaggccgaaacuggcuc

SEQ ID NO: 3039 - RNA, 38 nt, Artificial Sequence
  Description of Artificial Sequence:  Enzymatic Nucleic Acid
uugaaggucugaugaggccguuaggccgaaagacuggc

SEQ ID NO: 3040 - RNA, 38 nt, Artificial Sequence
  Description of Artificial Sequence:  Enzymatic Nucleic Acid
cgcgguugcugaugaggccguuaggccgaaaggugaga

SEQ ID NO: 3041 - RNA, 38 nt, Artificial Sequence
  Description of Artificial Sequence:  Enzymatic Nucleic Acid
ccgcgguucugaugaggccguuaggccgaaaaggugag

SEQ ID NO: 3042 - RNA, 38 nt, Artificial Sequence
  Description of Artificial Sequence:  Enzymatic Nucleic Acid
cagccuugcugaugaggccguuaggccgaaagccgcgg

SEQ ID NO: 3043 - RNA, 38 nt, Artificial Sequence
  Description of Artificial Sequence:  Enzymatic Nucleic Acid
ccagccuucugaugaggccguuaggccgaaaagccgcg

SEQ ID NO: 3044 - RNA, 38 nt, Artificial Sequence
  Description of Artificial Sequence:  Enzymatic Nucleic Acid
gaguuugccugaugaggccguuaggccgaaacgcaugu

SEQ ID NO: 3045 - RNA, 38 nt, Artificial Sequence
  Description of Artificial Sequence:  Enzymatic Nucleic Acid
accccaaacugaugaggccguuaggccgaaaguuugcg

SEQ ID NO: 3046 - RNA, 38 nt, Artificial Sequence
  Description of Artificial Sequence:  Enzymatic Nucleic Acid
agaccccacugaugaggccguuaggccgaaagaguuug

SEQ ID NO: 3047 - RNA, 38 nt, Artificial Sequence
  Description of Artificial Sequence:  Enzymatic Nucleic Acid
aagacccccugaugaggccguuaggccgaaaagaguuu

SEQ ID NO: 3048 - RNA, 38 nt, Artificial Sequence
  Description of Artificial Sequence:  Enzymatic Nucleic Acid
agccgcaacugaugaggccguuaggccgaaaccccaaa

SEQ ID NO: 3049 - RNA, 38 nt, Artificial Sequence
  Description of Artificial Sequence:  Enzymatic Nucleic Acid
ucagccgccugaugaggccguuaggccgaaagacccca

SEQ ID NO: 3050 - RNA, 38 nt, Artificial Sequence
  Description of Artificial Sequence:  Enzymatic Nucleic Acid
caggcugucugaugaggccguuaggccgaaacacuuca

SEQ ID NO: 3051 - RNA, 38 nt, Artificial Sequence
  Description of Artificial Sequence:  Enzymatic Nucleic Acid
aauccagacugaugaggccguuaggccgaaacaggcug

SEQ ID NO: 3052 - RNA, 38 nt, Artificial Sequence
  Description of Artificial Sequence:  Enzymatic Nucleic Acid
aaauccagcugaugaggccguuaggccgaaaacaggcu

SEQ ID NO: 3053 - RNA, 38 nt, Artificial Sequence
  Description of Artificial Sequence:  Enzymatic Nucleic Acid
caaauccacugaugaggccguuaggccgaaaaacaggc

SEQ ID NO: 3054 - RNA, 38 nt, Artificial Sequence
  Description of Artificial Sequence:  Enzymatic Nucleic Acid
caccugcacugaugaggccguuaggccgaaauccagaa

SEQ ID NO: 3055 - RNA, 38 nt, Artificial Sequence
  Description of Artificial Sequence:  Enzymatic Nucleic Acid
ucaccugccugaugaggccguuaggccgaaaauccaga

SEQ ID NO: 3056 - RNA, 38 nt, Artificial Sequence
  Description of Artificial Sequence:  Enzymatic Nucleic Acid
accgucugcugaugaggccguuaggccgaaaggcuguu

SEQ ID NO: 3057 - RNA, 38 nt, Artificial Sequence
  Description of Artificial Sequence:  Enzymatic Nucleic Acid
aucuuguacugaugaggccguuaggccgaaauguuggu

SEQ ID NO: 3058 - RNA, 38 nt, Artificial Sequence
  Description of Artificial Sequence:  Enzymatic Nucleic Acid
ggaucuugcugaugaggccguuaggccgaaagauguug

SEQ ID NO: 3059 - RNA, 38 nt, Artificial Sequence
  Description of Artificial Sequence:  Enzymatic Nucleic Acid
agcaggagcugaugaggccguuaggccgaaaucuugua

SEQ ID NO: 3060 - RNA, 38 nt, Artificial Sequence
  Description of Artificial Sequence:  Enzymatic Nucleic Acid
ugcagcagcugaugaggccguuaggccgaaaggaucuu

SEQ ID NO: 3061 - RNA, 38 nt, Artificial Sequence
  Description of Artificial Sequence:  Enzymatic Nucleic Acid
gaaaccugcugaugaggccguuaggccgaaacgccugc

SEQ ID NO: 3062 - RNA, 38 nt, Artificial Sequence
  Description of Artificial Sequence:  Enzymatic Nucleic Acid
augcgugacugaugaggccguuaggccgaaaccuguac

SEQ ID NO: 3063 - RNA, 38 nt, Artificial Sequence
  Description of Artificial Sequence:  Enzymatic Nucleic Acid
caugcgugcugaugaggccguuaggccgaaaaccugua

SEQ ID NO: 3064 - RNA, 38 nt, Artificial Sequence
  Description of Artificial Sequence:  Enzymatic Nucleic Acid
acaugcgucugaugaggccguuaggccgaaaaaccugu

SEQ ID NO: 3065 - RNA, 38 nt, Artificial Sequence
  Description of Artificial Sequence:  Enzymatic Nucleic Acid
ugaaauggcugaugaggccguuaggccgaaagcugcag

SEQ ID NO: 3066 - RNA, 38 nt, Artificial Sequence
  Description of Artificial Sequence:  Enzymatic Nucleic Acid
gcugaugacugaugaggccguuaggccgaaaugggagc

SEQ ID NO: 3067 - RNA, 38 nt, Artificial Sequence
  Description of Artificial Sequence:  Enzymatic Nucleic Acid
ugcugaugcugaugaggccguuaggccgaaaaugggag

SEQ ID NO: 3068 - RNA, 38 nt, Artificial Sequence
  Description of Artificial Sequence:  Enzymatic Nucleic Acid
uugcugaucugaugaggccguuaggccgaaaaauggga

SEQ ID NO: 3069 - RNA, 38 nt, Artificial Sequence
  Description of Artificial Sequence:  Enzymatic Nucleic Acid
aacuugcucugaugaggccguuaggccgaaaugaaaug

SEQ ID NO: 3070 - RNA, 38 nt, Artificial Sequence
  Description of Artificial Sequence:  Enzymatic Nucleic Acid
uucuuccacugaugaggccguuaggccgaaacuugcug

SEQ ID NO: 3071 - RNA, 38 nt, Artificial Sequence
  Description of Artificial Sequence:  Enzymatic Nucleic Acid
guucuucccugaugaggccguuaggccgaaaacuugcu

SEQ ID NO: 3072 - RNA, 38 nt, Artificial Sequence
  Description of Artificial Sequence:  Enzymatic Nucleic Acid
gcaggaaacugaugaggccguuaggccgaaaugugggg

SEQ ID NO: 3073 - RNA, 38 nt, Artificial Sequence
  Description of Artificial Sequence:  Enzymatic Nucleic Acid
cgcaggaacugaugaggccguuaggccgaaaauguggg

SEQ ID NO: 3074 - RNA, 38 nt, Artificial Sequence
  Description of Artificial Sequence:  Enzymatic Nucleic Acid
gcgcaggacugaugaggccguuaggccgaaaaaugugg

SEQ ID NO: 3075 - RNA, 38 nt, Artificial Sequence
  Description of Artificial Sequence:  Enzymatic Nucleic Acid
cgcgcaggcugaugaggccguuaggccgaaaaaaugug

SEQ ID NO: 3076 - RNA, 38 nt, Artificial Sequence
  Description of Artificial Sequence:  Enzymatic Nucleic Acid
acgcgcagcugaugaggccguuaggccgaaaaaaaugu

SEQ ID NO: 3077 - RNA, 38 nt, Artificial Sequence
  Description of Artificial Sequence:  Enzymatic Nucleic Acid
ucagagaucugaugaggccguuaggccgaaacgcgcag

SEQ ID NO: 3078 - RNA, 38 nt, Artificial Sequence
  Description of Artificial Sequence:  Enzymatic Nucleic Acid
gugucagacugaugaggccguuaggccgaaaugacgcg

SEQ ID NO: 3079 - RNA, 38 nt, Artificial Sequence
  Description of Artificial Sequence:  Enzymatic Nucleic Acid
ccgugucacugaugaggccguuaggccgaaagaugacg

SEQ ID NO: 3080 - RNA, 38 nt, Artificial Sequence
  Description of Artificial Sequence:  Enzymatic Nucleic Acid
agcagaggcugaugaggccguuaggccgaaaggccgug

SEQ ID NO: 3081 - RNA, 38 nt, Artificial Sequence
  Description of Artificial Sequence:  Enzymatic Nucleic Acid
gaguagcacugaugaggccguuaggccgaaagggaggc

SEQ ID NO: 3082 - RNA, 38 nt, Artificial Sequence
  Description of Artificial Sequence:  Enzymatic Nucleic Acid
ggauggagcugaugaggccguuaggccgaaagcagagg

SEQ ID NO: 3083 - RNA, 38 nt, Artificial Sequence
  Description of Artificial Sequence:  Enzymatic Nucleic Acid
ucaggaugcugaugaggccguuaggccgaaaguagcag

SEQ ID NO: 3084 - RNA, 38 nt, Artificial Sequence
  Description of Artificial Sequence:  Enzymatic Nucleic Acid
gcuuucagcugaugaggccguuaggccgaaauggagua

SEQ ID NO: 3085 - RNA, 38 nt, Artificial Sequence
  Description of Artificial Sequence:  Enzymatic Nucleic Acid
cccccagccugaugaggccguuaggccgaaacaucccu

SEQ ID NO: 3086 - RNA, 38 nt, Artificial Sequence
  Description of Artificial Sequence:  Enzymatic Nucleic Acid
ggagggcacugaugaggccguuaggccgaaagggccgg

SEQ ID NO: 3087 - RNA, 38 nt, Artificial Sequence
  Description of Artificial Sequence:  Enzymatic Nucleic Acid
cggccucgcugaugaggccguuaggccgaaagggcaga

SEQ ID NO: 3088 - RNA, 38 nt, Artificial Sequence
  Description of Artificial Sequence:  Enzymatic Nucleic Acid
ugagcaggcugaugaggccguuaggccgaaaugcuugg

SEQ ID NO: 3089 - RNA, 38 nt, Artificial Sequence
  Description of Artificial Sequence:  Enzymatic Nucleic Acid
uugagcagcugaugaggccguuaggccgaaaaugcuug

SEQ ID NO: 3090 - RNA, 38 nt, Artificial Sequence
  Description of Artificial Sequence:  Enzymatic Nucleic Acid
gucagcuucugaugaggccguuaggccgaaagcaggaa

SEQ ID NO: 3091 - RNA, 38 nt, Artificial Sequence
  Description of Artificial Sequence:  Enzymatic Nucleic Acid
acgguguccugaugaggccguuaggccgaaagucagcu

SEQ ID NO: 3092 - RNA, 38 nt, Artificial Sequence
  Description of Artificial Sequence:  Enzymatic Nucleic Acid
acguaggucugaugaggccguuaggccgaaacacggug

SEQ ID NO: 3093 - RNA, 38 nt, Artificial Sequence
  Description of Artificial Sequence:  Enzymatic Nucleic Acid
guggcacgcugaugaggccguuaggccgaaaggugaca

SEQ ID NO: 3094 - RNA, 38 nt, Artificial Sequence
  Description of Artificial Sequence:  Enzymatic Nucleic Acid
gaccccagcugaugaggccguuaggccgaaaguggcac

SEQ ID NO: 3095 - RNA, 38 nt, Artificial Sequence
  Description of Artificial Sequence:  Enzymatic Nucleic Acid
uccugagucugaugaggccguuaggccgaaaccccagg

SEQ ID NO: 3096 - RNA, 38 nt, Artificial Sequence
  Description of Artificial Sequence:  Enzymatic Nucleic Acid
gcuguccucugaugaggccguuaggccgaaagugaccc

SEQ ID NO: 3097 - RNA, 38 nt, Artificial Sequence
  Description of Artificial Sequence:  Enzymatic Nucleic Acid
gagcuucccugaugaggccguuaggccgaaacucagcu

SEQ ID NO: 3098 - RNA, 38 nt, Artificial Sequence
  Description of Artificial Sequence:  Enzymatic Nucleic Acid
guccccggcugaugaggccguuaggccgaaagcuuccg

SEQ ID NO: 3099 - RNA, 38 nt, Artificial Sequence
  Description of Artificial Sequence:  Enzymatic Nucleic Acid
ugaagucucugaugaggccguuaggccgaaagggcagu

SEQ ID NO: 3100 - RNA, 38 nt, Artificial Sequence
  Description of Artificial Sequence:  Enzymatic Nucleic Acid
uggucuugcugaugaggccguuaggccgaaagucugag

SEQ ID NO: 3101 - RNA, 38 nt, Artificial Sequence
  Description of Artificial Sequence:  Enzymatic Nucleic Acid
auggucuucugaugaggccguuaggccgaaaagucuga

SEQ ID NO: 3102 - RNA, 38 nt, Artificial Sequence
  Description of Artificial Sequence:  Enzymatic Nucleic Acid
caguccagcugaugaggccguuaggccgaaauggucuu

SEQ ID NO: 3103 - RNA, 38 nt, Artificial Sequence
  Description of Artificial Sequence:  Enzymatic Nucleic Acid
cccggcgucugaugaggccguuaggccgaaacagggcu

SEQ ID NO: 3104 - RNA, 38 nt, Artificial Sequence
  Description of Artificial Sequence:  Enzymatic Nucleic Acid
gggacguacugaugaggccguuaggccgaaagcccggc

SEQ ID NO: 3105 - RNA, 38 nt, Artificial Sequence
  Description of Artificial Sequence:  Enzymatic Nucleic Acid
cugggacgcugaugaggccguuaggccgaaagagcccg

SEQ ID NO: 3106 - RNA, 38 nt, Artificial Sequence
  Description of Artificial Sequence:  Enzymatic Nucleic Acid
cucccuggcugaugaggccguuaggccgaaacguagag

SEQ ID NO: 3107 - RNA, 38 nt, Artificial Sequence
  Description of Artificial Sequence:  Enzymatic Nucleic Acid
aggccucacugaugaggccguuaggccgaaacucccag

SEQ ID NO: 3108 - RNA, 38 nt, Artificial Sequence
  Description of Artificial Sequence:  Enzymatic Nucleic Acid
cucggccacugaugaggccguuaggccgaaacacucac

SEQ ID NO: 3109 - RNA, 38 nt, Artificial Sequence
  Description of Artificial Sequence:  Enzymatic Nucleic Acid
ccucggcccugaugaggccguuaggccgaaaacacuca

SEQ ID NO: 3110 - RNA, 38 nt, Artificial Sequence
  Description of Artificial Sequence:  Enzymatic Nucleic Acid
uucagccgcugaugaggccguuaggccgaaacaugcag

SEQ ID NO: 3111 - RNA, 38 nt, Artificial Sequence
  Description of Artificial Sequence:  Enzymatic Nucleic Acid
cucagccgcugaugaggccguuaggccgaaacacucag

SEQ ID NO: 3112 - RNA, 38 nt, Artificial Sequence
  Description of Artificial Sequence:  Enzymatic Nucleic Acid
cuuggcugcugaugaggccguuaggccgaaacacucgc

SEQ ID NO: 3113 - RNA, 38 nt, Artificial Sequence
  Description of Artificial Sequence:  Enzymatic Nucleic Acid
gugugcugcugaugaggccguuaggccgaaacacucag

SEQ ID NO: 3114 - RNA, 38 nt, Artificial Sequence
  Description of Artificial Sequence:  Enzymatic Nucleic Acid
gaagugaacugaugaggccguuaggccgaaacggcagg

SEQ ID NO: 3115 - RNA, 38 nt, Artificial Sequence
  Description of Artificial Sequence:  Enzymatic Nucleic Acid
gggaagugcugaugaggccguuaggccgaaagacggca

SEQ ID NO: 3116 - RNA, 38 nt, Artificial Sequence
  Description of Artificial Sequence:  Enzymatic Nucleic Acid
ggggaagucugaugaggccguuaggccgaaaagacggc

SEQ ID NO: 3117 - RNA, 38 nt, Artificial Sequence
  Description of Artificial Sequence:  Enzymatic Nucleic Acid
cuguggggcugaugaggccguuaggccgaaagugaaga

SEQ ID NO: 3118 - RNA, 38 nt, Artificial Sequence
  Description of Artificial Sequence:  Enzymatic Nucleic Acid
ccugugggcugaugaggccguuaggccgaaaagugaag

SEQ ID NO: 3119 - RNA, 38 nt, Artificial Sequence
  Description of Artificial Sequence:  Enzymatic Nucleic Acid
guggagcccugaugaggccguuaggccgaaagcgccag

SEQ ID NO: 3120 - RNA, 38 nt, Artificial Sequence
  Description of Artificial Sequence:  Enzymatic Nucleic Acid
cuggggugcugaugaggccguuaggccgaaagccgagc

SEQ ID NO: 3121 - RNA, 38 nt, Artificial Sequence
  Description of Artificial Sequence:  Enzymatic Nucleic Acid
gugaggaacugaugaggccguuaggccgaaagcuggcc

SEQ ID NO: 3122 - RNA, 38 nt, Artificial Sequence
  Description of Artificial Sequence:  Enzymatic Nucleic Acid
ggugaggacugaugaggccguuaggccgaaaagcuggc

SEQ ID NO: 3123 - RNA, 38 nt, Artificial Sequence
  Description of Artificial Sequence:  Enzymatic Nucleic Acid
uggugaggcugaugaggccguuaggccgaaaaagcugg

SEQ ID NO: 3124 - RNA, 38 nt, Artificial Sequence
  Description of Artificial Sequence:  Enzymatic Nucleic Acid
cuggugagcugaugaggccguuaggccgaaaaaagcug

SEQ ID NO: 3125 - RNA, 38 nt, Artificial Sequence
  Description of Artificial Sequence:  Enzymatic Nucleic Acid
cuccuggucugaugaggccguuaggccgaaaggaaaag

SEQ ID NO: 3126 - RNA, 38 nt, Artificial Sequence
  Description of Artificial Sequence:  Enzymatic Nucleic Acid
gggaguggcugaugaggccguuaggccgaaagccgggc

SEQ ID NO: 3127 - RNA, 38 nt, Artificial Sequence
  Description of Artificial Sequence:  Enzymatic Nucleic Acid
ggggagugcugaugaggccguuaggccgaaaagccggg

SEQ ID NO: 3128 - RNA, 38 nt, Artificial Sequence
  Description of Artificial Sequence:  Enzymatic Nucleic Acid
uaugugggcugaugaggccguuaggccgaaaguggaag

SEQ ID NO: 3129 - RNA, 38 nt, Artificial Sequence
  Description of Artificial Sequence:  Enzymatic Nucleic Acid
acuauucccugaugaggccguuaggccgaaaugugggg

SEQ ID NO: 3130 - RNA, 38 nt, Artificial Sequence
  Description of Artificial Sequence:  Enzymatic Nucleic Acid
ggauggaccugaugaggccguuaggccgaaauuccuau

SEQ ID NO: 3131 - RNA, 38 nt, Artificial Sequence
  Description of Artificial Sequence:  Enzymatic Nucleic Acid
uggggaugcugaugaggccguuaggccgaaacuauucc

SEQ ID NO: 3132 - RNA, 38 nt, Artificial Sequence
  Description of Artificial Sequence:  Enzymatic Nucleic Acid
aaucugggcugaugaggccguuaggccgaaauggacua

SEQ ID NO: 3133 - RNA, 38 nt, Artificial Sequence
  Description of Artificial Sequence:  Enzymatic Nucleic Acid
caauggcgcugaugaggccguuaggccgaaaucugggg

SEQ ID NO: 3134 - RNA, 38 nt, Artificial Sequence
  Description of Artificial Sequence:  Enzymatic Nucleic Acid
acaauggccugaugaggccguuaggccgaaaaucuggg

SEQ ID NO: 3135 - RNA, 38 nt, Artificial Sequence
  Description of Artificial Sequence:  Enzymatic Nucleic Acid
gggugaaccugaugaggccguuaggccgaaauggcgaa

SEQ ID NO: 3136 - RNA, 38 nt, Artificial Sequence
  Description of Artificial Sequence:  Enzymatic Nucleic Acid
gaggggugcugaugaggccguuaggccgaaacaauggc

SEQ ID NO: 3137 - RNA, 38 nt, Artificial Sequence
  Description of Artificial Sequence:  Enzymatic Nucleic Acid
cgaggggucugaugaggccguuaggccgaaaacaaugg

SEQ ID NO: 3138 - RNA, 38 nt, Artificial Sequence
  Description of Artificial Sequence:  Enzymatic Nucleic Acid
ggcagggccugaugaggccguuaggccgaaagggguga

SEQ ID NO: 3139 - RNA, 38 nt, Artificial Sequence
  Description of Artificial Sequence:  Enzymatic Nucleic Acid
aggcaaagcugaugaggccguuaggccgaaagggcagg

SEQ ID NO: 3140 - RNA, 38 nt, Artificial Sequence
  Description of Artificial Sequence:  Enzymatic Nucleic Acid
ggaaggcacugaugaggccguuaggccgaaaggagggc

SEQ ID NO: 3141 - RNA, 38 nt, Artificial Sequence
  Description of Artificial Sequence:  Enzymatic Nucleic Acid
uggaaggccugaugaggccguuaggccgaaaaggaggg

SEQ ID NO: 3142 - RNA, 38 nt, Artificial Sequence
  Description of Artificial Sequence:  Enzymatic Nucleic Acid
ggggguggcugaugaggccguuaggccgaaaggcaaag

SEQ ID NO: 3143 - RNA, 38 nt, Artificial Sequence
  Description of Artificial Sequence:  Enzymatic Nucleic Acid
ugggggugcugaugaggccguuaggccgaaaaggcaaa

SEQ ID NO: 3144 - RNA, 38 nt, Artificial Sequence
  Description of Artificial Sequence:  Enzymatic Nucleic Acid
uccaccugcugaugaggccguuaggccgaaaugguggg

SEQ ID NO: 3145 - RNA, 38 nt, Artificial Sequence
  Description of Artificial Sequence:  Enzymatic Nucleic Acid
aauucccacugaugaggccguuaggccgaaagcuccca

SEQ ID NO: 3146 - RNA, 38 nt, Artificial Sequence
  Description of Artificial Sequence:  Enzymatic Nucleic Acid
ucacuccacugaugaggccguuaggccgaaauucccag

SEQ ID NO: 3147 - RNA, 38 nt, Artificial Sequence
  Description of Artificial Sequence:  Enzymatic Nucleic Acid
gucacucccugaugaggccguuaggccgaaaauuccca

SEQ ID NO: 3148 - RNA, 38 nt, Artificial Sequence
  Description of Artificial Sequence:  Enzymatic Nucleic Acid
cgccugugcugaugaggccguuaggccgaaacagggca

SEQ ID NO: 3149 - RNA, 38 nt, Artificial Sequence
  Description of Artificial Sequence:  Enzymatic Nucleic Acid
cccacaggcugaugaggccguuaggccgaaacccccau

SEQ ID NO: 3150 - RNA, 38 nt, Artificial Sequence
  Description of Artificial Sequence:  Enzymatic Nucleic Acid
cccaauuucugaugaggccguuaggccgaaacccacag

SEQ ID NO: 3151 - RNA, 38 nt, Artificial Sequence
  Description of Artificial Sequence:  Enzymatic Nucleic Acid
cucccccccugaugaggccguuaggccgaaauuugacc

SEQ ID NO: 3152 - RNA, 38 nt, Artificial Sequence
  Description of Artificial Sequence:  Enzymatic Nucleic Acid
caguauuucugaugaggccguuaggccgaaacucccac

SEQ ID NO: 3153 - RNA, 38 nt, Artificial Sequence
  Description of Artificial Sequence:  Enzymatic Nucleic Acid
auauucagcugaugaggccguuaggccgaaauuuuacu

SEQ ID NO: 3154 - RNA, 38 nt, Artificial Sequence
  Description of Artificial Sequence:  Enzymatic Nucleic Acid
aacucauacugaugaggccguuaggccgaaauucagua

SEQ ID NO: 3155 - RNA, 38 nt, Artificial Sequence
  Description of Artificial Sequence:  Enzymatic Nucleic Acid
aaaacucacugaugaggccguuaggccgaaauauucag

SEQ ID NO: 3156 - RNA, 38 nt, Artificial Sequence
  Description of Artificial Sequence:  Enzymatic Nucleic Acid
aacugaaacugaugaggccguuaggccgaaacucauau

SEQ ID NO: 3157 - RNA, 38 nt, Artificial Sequence
  Description of Artificial Sequence:  Enzymatic Nucleic Acid
aaacugaacugaugaggccguuaggccgaaaacucaua

SEQ ID NO: 3158 - RNA, 38 nt, Artificial Sequence
  Description of Artificial Sequence:  Enzymatic Nucleic Acid
aaaacugacugaugaggccguuaggccgaaaaacucau

SEQ ID NO: 3159 - RNA, 38 nt, Artificial Sequence
  Description of Artificial Sequence:  Enzymatic Nucleic Acid
caaaacugcugaugaggccguuaggccgaaaaaacuca

SEQ ID NO: 3160 - RNA, 38 nt, Artificial Sequence
  Description of Artificial Sequence:  Enzymatic Nucleic Acid
ucaaaacucugaugaggccguuaggccgaaaaaaacuc

SEQ ID NO: 3161 - RNA, 38 nt, Artificial Sequence
  Description of Artificial Sequence:  Enzymatic Nucleic Acid
uuuuucaacugaugaggccguuaggccgaaacugaaaa

SEQ ID NO: 3162 - RNA, 38 nt, Artificial Sequence
  Description of Artificial Sequence:  Enzymatic Nucleic Acid
uuuuuucacugaugaggccguuaggccgaaaacugaaa

SEQ ID NO: 3163 - RNA, 38 nt, Artificial Sequence
  Description of Artificial Sequence:  Enzymatic Nucleic Acid
uuuuuuuccugaugaggccguuaggccgaaaaacugaa

SEQ ID NO: 3164 - RNA, 38 nt, Artificial Sequence
  Description of Artificial Sequence:  Enzymatic Nucleic Acid
  misc_feature (31)..(31): n stands for inosine
gcgcagcacugaugaggccguuaggccgaanacgcagc

SEQ ID NO: 3165 - RNA, 38 nt, Artificial Sequence
  Description of Artificial Sequence:  Enzymatic Nucleic Acid
  misc_feature (31)..(31): n stands for inosine
ugcgcagccugaugaggccguuaggccgaangacgcag

SEQ ID NO: 3166 - RNA, 38 nt, Artificial Sequence
  Description of Artificial Sequence:  Enzymatic Nucleic Acid
  misc_feature (31)..(31): n stands for inosine
acgugcgccugaugaggccguuaggccgaancaggacg

SEQ ID NO: 3167 - RNA, 38 nt, Artificial Sequence
  Description of Artificial Sequence:  Enzymatic Nucleic Acid
  misc_feature (31)..(31): n stands for inosine
uucccacgcugaugaggccguuaggccgaancgcagca

SEQ ID NO: 3168 - RNA, 38 nt, Artificial Sequence
  Description of Artificial Sequence:  Enzymatic Nucleic Acid
  misc_feature (31)..(31): n stands for inosine
ggggccagcugaugaggccguuaggccgaancuuccca

SEQ ID NO: 3169 - RNA, 38 nt, Artificial Sequence
  Description of Artificial Sequence:  Enzymatic Nucleic Acid
  misc_feature (31)..(31): n stands for inosine
cggggccacugaugaggccguuaggccgaangcuuccc

SEQ ID NO: 3170 - RNA, 38 nt, Artificial Sequence
  Description of Artificial Sequence:  Enzymatic Nucleic Acid
  misc_feature (31)..(31): n stands for inosine
ccggggcccugaugaggccguuaggccgaanggcuucc

SEQ ID NO: 3171 - RNA, 38 nt, Artificial Sequence
  Description of Artificial Sequence:  Enzymatic Nucleic Acid
  misc_feature (31)..(31): n stands for inosine
guggccggcugaugaggccguuaggccgaanccagggc

SEQ ID NO: 3172 - RNA, 38 nt, Artificial Sequence
  Description of Artificial Sequence:  Enzymatic Nucleic Acid
  misc_feature (31)..(31): n stands for inosine
gguggccgcugaugaggccguuaggccgaangccaggg

SEQ ID NO: 3173 - RNA, 38 nt, Artificial Sequence
  Description of Artificial Sequence:  Enzymatic Nucleic Acid
  misc_feature (31)..(31): n stands for inosine
ggguggcccugaugaggccguuaggccgaanggccagg

SEQ ID NO: 3174 - RNA, 38 nt, Artificial Sequence
  Description of Artificial Sequence:  Enzymatic Nucleic Acid
  misc_feature (31)..(31): n stands for inosine
gcgggggucugaugaggccguuaggccgaanccggggc

SEQ ID NO: 3175 - RNA, 38 nt, Artificial Sequence
  Description of Artificial Sequence:  Enzymatic Nucleic Acid
  misc_feature (31)..(31): n stands for inosine
cgcgggggcugaugaggccguuaggccgaangccgggg

SEQ ID NO: 3176 - RNA, 38 nt, Artificial Sequence
  Description of Artificial Sequence:  Enzymatic Nucleic Acid
  misc_feature (31)..(31): n stands for inosine
aucgcgggcugaugaggccguuaggccgaanuggccgg

SEQ ID NO: 3177 - RNA, 38 nt, Artificial Sequence
  Description of Artificial Sequence:  Enzymatic Nucleic Acid
  misc_feature (31)..(31): n stands for inosine
caucgcggcugaugaggccguuaggccgaanguggccg

SEQ ID NO: 3178 - RNA, 38 nt, Artificial Sequence
  Description of Artificial Sequence:  Enzymatic Nucleic Acid
  misc_feature (31)..(31): n stands for inosine
gcaucgcgcugaugaggccguuaggccgaangguggcc

SEQ ID NO: 3179 - RNA, 38 nt, Artificial Sequence
  Description of Artificial Sequence:  Enzymatic Nucleic Acid
  misc_feature (31)..(31): n stands for inosine
ggcaucgccugaugaggccguuaggccgaanggguggc

SEQ ID NO: 3180 - RNA, 38 nt, Artificial Sequence
  Description of Artificial Sequence:  Enzymatic Nucleic Acid
  misc_feature (31)..(31): n stands for inosine
gagcgcgccugaugaggccguuaggccgaancaucgcg

SEQ ID NO: 3181 - RNA, 38 nt, Artificial Sequence
  Description of Artificial Sequence:  Enzymatic Nucleic Acid
  misc_feature (31)..(31): n stands for inosine
cagcggggcugaugaggccguuaggccgaancgcgcgg

SEQ ID NO: 3182 - RNA, 38 nt, Artificial Sequence
  Description of Artificial Sequence:  Enzymatic Nucleic Acid
  misc_feature (31)..(31): n stands for inosine
ggcagcggcugaugaggccguuaggccgaanagcgcgc

SEQ ID NO: 3183 - RNA, 38 nt, Artificial Sequence
  Description of Artificial Sequence:  Enzymatic Nucleic Acid
  misc_feature (31)..(31): n stands for inosine
cggcagcgcugaugaggccguuaggccgaangagcgcg

SEQ ID NO: 3184 - RNA, 38 nt, Artificial Sequence
  Description of Artificial Sequence:  Enzymatic Nucleic Acid
  misc_feature (31)..(31): n stands for inosine
ucggcagccugaugaggccguuaggccgaanggagcgc

SEQ ID NO: 3185 - RNA, 38 nt, Artificial Sequence
  Description of Artificial Sequence:  Enzymatic Nucleic Acid
  misc_feature (31)..(31): n stands for inosine
ggcucggccugaugaggccguuaggccgaancggggag

SEQ ID NO: 3186 - RNA, 38 nt, Artificial Sequence
  Description of Artificial Sequence:  Enzymatic Nucleic Acid
  misc_feature (31)..(31): n stands for inosine
cacggcuccugaugaggccguuaggccgaancagcggg

SEQ ID NO: 3187 - RNA, 38 nt, Artificial Sequence
  Description of Artificial Sequence:  Enzymatic Nucleic Acid
  misc_feature (31)..(31): n stands for inosine
gagcgcaccugaugaggccguuaggccgaancucggca

SEQ ID NO: 3188 - RNA, 38 nt, Artificial Sequence
  Description of Artificial Sequence:  Enzymatic Nucleic Acid
  misc_feature (31)..(31): n stands for inosine
cagcagggcugaugaggccguuaggccgaancgcacgg

SEQ ID NO: 3189 - RNA, 38 nt, Artificial Sequence
  Description of Artificial Sequence:  Enzymatic Nucleic Acid
  misc_feature (31)..(31): n stands for inosine
cgcagcagcugaugaggccguuaggccgaanagcgcac

SEQ ID NO: 3190 - RNA, 38 nt, Artificial Sequence
  Description of Artificial Sequence:  Enzymatic Nucleic Acid
  misc_feature (31)..(31): n stands for inosine
gcgcagcacugaugaggccguuaggccgaangagcgca

SEQ ID NO: 3191 - RNA, 38 nt, Artificial Sequence
  Description of Artificial Sequence:  Enzymatic Nucleic Acid
  misc_feature (31)..(31): n stands for inosine
ugcgcagccugaugaggccguuaggccgaanggagcgc

SEQ ID NO: 3192 - RNA, 38 nt, Artificial Sequence
  Description of Artificial Sequence:  Enzymatic Nucleic Acid
  misc_feature (31)..(31): n stands for inosine
ggcugcgccugaugaggccguuaggccgaancagggag

SEQ ID NO: 3193 - RNA, 38 nt, Artificial Sequence
  Description of Artificial Sequence:  Enzymatic Nucleic Acid
  misc_feature (31)..(31): n stands for inosine
guaguggccugaugaggccguuaggccgaancgcagca

SEQ ID NO: 3194 - RNA, 38 nt, Artificial Sequence
  Description of Artificial Sequence:  Enzymatic Nucleic Acid
  misc_feature (31)..(31): n stands for inosine
gcgguagucugaugaggccguuaggccgaancugcgca

SEQ ID NO: 3195 - RNA, 38 nt, Artificial Sequence
  Description of Artificial Sequence:  Enzymatic Nucleic Acid
  misc_feature (31)..(31): n stands for inosine
cgcgguagcugaugaggccguuaggccgaangcugcgc

SEQ ID NO: 3196 - RNA, 38 nt, Artificial Sequence
  Description of Artificial Sequence:  Enzymatic Nucleic Acid
  misc_feature (31)..(31): n stands for inosine
cucgcggucugaugaggccguuaggccgaanuggcugc

SEQ ID NO: 3197 - RNA, 38 nt, Artificial Sequence
  Description of Artificial Sequence:  Enzymatic Nucleic Acid
  misc_feature (31)..(31): n stands for inosine
caccucgccugaugaggccguuaggccgaanuaguggc

SEQ ID NO: 3198 - RNA, 38 nt, Artificial Sequence
  Description of Artificial Sequence:  Enzymatic Nucleic Acid
  misc_feature (31)..(31): n stands for inosine
ccagcggccugaugaggccguuaggccgaancaccucg

SEQ ID NO: 3199 - RNA, 38 nt, Artificial Sequence
  Description of Artificial Sequence:  Enzymatic Nucleic Acid
  misc_feature (31)..(31): n stands for inosine
uggccagccugaugaggccguuaggccgaancagcacc

SEQ ID NO: 3200 - RNA, 38 nt, Artificial Sequence
  Description of Artificial Sequence:  Enzymatic Nucleic Acid
  misc_feature (31)..(31): n stands for inosine
acguggcccugaugaggccguuaggccgaancggcagc

SEQ ID NO: 3201 - RNA, 38 nt, Artificial Sequence
  Description of Artificial Sequence:  Enzymatic Nucleic Acid
  misc_feature (31)..(31): n stands for inosine
acgaacgucugaugaggccguuaggccgaanccagcgg

SEQ ID NO: 3202 - RNA, 38 nt, Artificial Sequence
  Description of Artificial Sequence:  Enzymatic Nucleic Acid
  misc_feature (31)..(31): n stands for inosine
cacgaacgcugaugaggccguuaggccgaangccagcg

SEQ ID NO: 3203 - RNA, 38 nt, Artificial Sequence
  Description of Artificial Sequence:  Enzymatic Nucleic Acid
  misc_feature (31)..(31): n stands for inosine
gggccccacugaugaggccguuaggccgaancgccgca

SEQ ID NO: 3204 - RNA, 38 nt, Artificial Sequence
  Description of Artificial Sequence:  Enzymatic Nucleic Acid
  misc_feature (31)..(31): n stands for inosine
ggggcccccugaugaggccguuaggccgaangcgccgc

SEQ ID NO: 3205 - RNA, 38 nt, Artificial Sequence
  Description of Artificial Sequence:  Enzymatic Nucleic Acid
  misc_feature (31)..(31): n stands for inosine
agcccuggcugaugaggccguuaggccgaanccccagg

SEQ ID NO: 3206 - RNA, 38 nt, Artificial Sequence
  Description of Artificial Sequence:  Enzymatic Nucleic Acid
  misc_feature (31)..(31): n stands for inosine
cagcccugcugaugaggccguuaggccgaangccccag

SEQ ID NO: 3207 - RNA, 38 nt, Artificial Sequence
  Description of Artificial Sequence:  Enzymatic Nucleic Acid
  misc_feature (31)..(31): n stands for inosine
ccagcccucugaugaggccguuaggccgaanggcccca

SEQ ID NO: 3208 - RNA, 38 nt, Artificial Sequence
  Description of Artificial Sequence:  Enzymatic Nucleic Acid
  misc_feature (31)..(31): n stands for inosine
gccagccccugaugaggccguuaggccgaangggcccc

SEQ ID NO: 3209 - RNA, 38 nt, Artificial Sequence
  Description of Artificial Sequence:  Enzymatic Nucleic Acid
  misc_feature (31)..(31): n stands for inosine
cagccgcccugaugaggccguuaggccgaancccuggg

SEQ ID NO: 3210 - RNA, 38 nt, Artificial Sequence
  Description of Artificial Sequence:  Enzymatic Nucleic Acid
  misc_feature (31)..(31): n stands for inosine
gcugcacccugaugaggccguuaggccgaanccgccag

SEQ ID NO: 3211 - RNA, 38 nt, Artificial Sequence
  Description of Artificial Sequence:  Enzymatic Nucleic Acid
  misc_feature (31)..(31): n stands for inosine
ccccgcgccugaugaggccguuaggccgaancaccagc

SEQ ID NO: 3212 - RNA, 38 nt, Artificial Sequence
  Description of Artificial Sequence:  Enzymatic Nucleic Acid
  misc_feature (31)..(31): n stands for inosine
agccgccgcugaugaggccguuaggccgaanuccccgc

SEQ ID NO: 3213 - RNA, 38 nt, Artificial Sequence
  Description of Artificial Sequence:  Enzymatic Nucleic Acid
  misc_feature (31)..(31): n stands for inosine
aagccgcccugaugaggccguuaggccgaanguccccg

SEQ ID NO: 3214 - RNA, 38 nt, Artificial Sequence
  Description of Artificial Sequence:  Enzymatic Nucleic Acid
  misc_feature (31)..(31): n stands for inosine
gcgcggaacugaugaggccguuaggccgaanccgccgg

SEQ ID NO: 3215 - RNA, 38 nt, Artificial Sequence
  Description of Artificial Sequence:  Enzymatic Nucleic Acid
  misc_feature (31)..(31): n stands for inosine
cagcgcgccugaugaggccguuaggccgaanaaagccg

SEQ ID NO: 3216 - RNA, 38 nt, Artificial Sequence
  Description of Artificial Sequence:  Enzymatic Nucleic Acid
  misc_feature (31)..(31): n stands for inosine
gggccacccugaugaggccguuaggccgaancgcgcgg

SEQ ID NO: 3217 - RNA, 38 nt, Artificial Sequence
  Description of Artificial Sequence:  Enzymatic Nucleic Acid
  misc_feature (31)..(31): n stands for inosine
aggcacugcugaugaggccguuaggccgaanccaccag

SEQ ID NO: 3218 - RNA, 38 nt, Artificial Sequence
  Description of Artificial Sequence:  Enzymatic Nucleic Acid
  misc_feature (31)..(31): n stands for inosine
caggcacucugaugaggccguuaggccgaangccacca

SEQ ID NO: 3219 - RNA, 38 nt, Artificial Sequence
  Description of Artificial Sequence:  Enzymatic Nucleic Acid
  misc_feature (31)..(31): n stands for inosine
ccaggcaccugaugaggccguuaggccgaanggccacc

SEQ ID NO: 3220 - RNA, 38 nt, Artificial Sequence
  Description of Artificial Sequence:  Enzymatic Nucleic Acid
  misc_feature (31)..(31): n stands for inosine
gcacaccacugaugaggccguuaggccgaancacuggg

SEQ ID NO: 3221 - RNA, 38 nt, Artificial Sequence
  Description of Artificial Sequence:  Enzymatic Nucleic Acid
  misc_feature (31)..(31): n stands for inosine
cgcacacccugaugaggccguuaggccgaangcacugg

SEQ ID NO: 3222 - RNA, 38 nt, Artificial Sequence
  Description of Artificial Sequence:  Enzymatic Nucleic Acid
  misc_feature (31)..(31): n stands for inosine
cgucccagcugaugaggccguuaggccgaancacgcac

SEQ ID NO: 3223 - RNA, 38 nt, Artificial Sequence
  Description of Artificial Sequence:  Enzymatic Nucleic Acid
  misc_feature (31)..(31): n stands for inosine
gcgucccacugaugaggccguuaggccgaangcacgca

SEQ ID NO: 3224 - RNA, 38 nt, Artificial Sequence
  Description of Artificial Sequence:  Enzymatic Nucleic Acid
  misc_feature (31)..(31): n stands for inosine
ugcguccccugaugaggccguuaggccgaanggcacgc

SEQ ID NO: 3225 - RNA, 38 nt, Artificial Sequence
  Description of Artificial Sequence:  Enzymatic Nucleic Acid
  misc_feature (31)..(31): n stands for inosine
ggcggccgcugaugaggccguuaggccgaancguccca

SEQ ID NO: 3226 - RNA, 38 nt, Artificial Sequence
  Description of Artificial Sequence:  Enzymatic Nucleic Acid
  misc_feature (31)..(31): n stands for inosine
cggggggccugaugaggccguuaggccgaanccgugcg

SEQ ID NO: 3227 - RNA, 38 nt, Artificial Sequence
  Description of Artificial Sequence:  Enzymatic Nucleic Acid
  misc_feature (31)..(31): n stands for inosine
cggcggggcugaugaggccguuaggccgaancggccgu

SEQ ID NO: 3228 - RNA, 38 nt, Artificial Sequence
  Description of Artificial Sequence:  Enzymatic Nucleic Acid
  misc_feature (31)..(31): n stands for inosine
gcggcgggcugaugaggccguuaggccgaangcggccg

SEQ ID NO: 3229 - RNA, 38 nt, Artificial Sequence
  Description of Artificial Sequence:  Enzymatic Nucleic Acid
  misc_feature (31)..(31): n stands for inosine
ggcggcggcugaugaggccguuaggccgaanggcggcc

SEQ ID NO: 3230 - RNA, 38 nt, Artificial Sequence
  Description of Artificial Sequence:  Enzymatic Nucleic Acid
  misc_feature (31)..(31): n stands for inosine
gggcggcgcugaugaggccguuaggccgaangggcggc

SEQ ID NO: 3231 - RNA, 38 nt, Artificial Sequence
  Description of Artificial Sequence:  Enzymatic Nucleic Acid
  misc_feature (31)..(31): n stands for inosine
ggggcggccugaugaggccguuaggccgaanggggcgg

SEQ ID NO: 3232 - RNA, 38 nt, Artificial Sequence
  Description of Artificial Sequence:  Enzymatic Nucleic Acid
  misc_feature (31)..(31): n stands for inosine
gagggggccugaugaggccguuaggccgaancgggggg

SEQ ID NO: 3233 - RNA, 38 nt, Artificial Sequence
  Description of Artificial Sequence:  Enzymatic Nucleic Acid
  misc_feature (31)..(31): n stands for inosine
aaggagggcugaugaggccguuaggccgaancggcggg

SEQ ID NO: 3234 - RNA, 38 nt, Artificial Sequence
  Description of Artificial Sequence:  Enzymatic Nucleic Acid
  misc_feature (31)..(31): n stands for inosine
gaaggaggcugaugaggccguuaggccgaangcggcgg

SEQ ID NO: 3235 - RNA, 38 nt, Artificial Sequence
  Description of Artificial Sequence:  Enzymatic Nucleic Acid
  misc_feature (31)..(31): n stands for inosine
ggaaggagcugaugaggccguuaggccgaanggcggcg

SEQ ID NO: 3236 - RNA, 38 nt, Artificial Sequence
  Description of Artificial Sequence:  Enzymatic Nucleic Acid
  misc_feature (31)..(31): n stands for inosine
cggaaggacugaugaggccguuaggccgaangggcggc

SEQ ID NO: 3237 - RNA, 38 nt, Artificial Sequence
  Description of Artificial Sequence:  Enzymatic Nucleic Acid
  misc_feature (31)..(31): n stands for inosine
gcggaaggcugaugaggccguuaggccgaanggggcgg

SEQ ID NO: 3238 - RNA, 38 nt, Artificial Sequence
  Description of Artificial Sequence:  Enzymatic Nucleic Acid
  misc_feature (31)..(31): n stands for inosine
uggcggaacugaugaggccguuaggccgaanagggggc

SEQ ID NO: 3239 - RNA, 38 nt, Artificial Sequence
  Description of Artificial Sequence:  Enzymatic Nucleic Acid
  misc_feature (31)..(31): n stands for inosine
cuggcggacugaugaggccguuaggccgaangaggggg

SEQ ID NO: 3240 - RNA, 38 nt, Artificial Sequence
  Description of Artificial Sequence:  Enzymatic Nucleic Acid
  misc_feature (31)..(31): n stands for inosine
caccuggccugaugaggccguuaggccgaanaaggagg

SEQ ID NO: 3241 - RNA, 38 nt, Artificial Sequence
  Description of Artificial Sequence:  Enzymatic Nucleic Acid
  misc_feature (31)..(31): n stands for inosine
ggacaccucugaugaggccguuaggccgaancggaagg

SEQ ID NO: 3242 - RNA, 38 nt, Artificial Sequence
  Description of Artificial Sequence:  Enzymatic Nucleic Acid
  misc_feature (31)..(31): n stands for inosine
aggacacccugaugaggccguuaggccgaangcggaag

SEQ ID NO: 3243 - RNA, 38 nt, Artificial Sequence
  Description of Artificial Sequence:  Enzymatic Nucleic Acid
  misc_feature (31)..(31): n stands for inosine
uucaggcacugaugaggccguuaggccgaanacaccug

SEQ ID NO: 3244 - RNA, 38 nt, Artificial Sequence
  Description of Artificial Sequence:  Enzymatic Nucleic Acid
  misc_feature (31)..(31): n stands for inosine
cuucaggccugaugaggccguuaggccgaangacaccu

SEQ ID NO: 3245 - RNA, 38 nt, Artificial Sequence
  Description of Artificial Sequence:  Enzymatic Nucleic Acid
  misc_feature (31)..(31): n stands for inosine
cuccuucacugaugaggccguuaggccgaancaggaca

SEQ ID NO: 3246 - RNA, 38 nt, Artificial Sequence
  Description of Artificial Sequence:  Enzymatic Nucleic Acid
  misc_feature (31)..(31): n stands for inosine
gcuccuuccugaugaggccguuaggccgaangcaggac

SEQ ID NO: 3247 - RNA, 38 nt, Artificial Sequence
  Description of Artificial Sequence:  Enzymatic Nucleic Acid
  misc_feature (31)..(31): n stands for inosine
gggccacccugaugaggccguuaggccgaancuccuuc

SEQ ID NO: 3248 - RNA, 38 nt, Artificial Sequence
  Description of Artificial Sequence:  Enzymatic Nucleic Acid
  misc_feature (31)..(31): n stands for inosine
agcacucgcugaugaggccguuaggccgaanccaccag

SEQ ID NO: 3249 - RNA, 38 nt, Artificial Sequence
  Description of Artificial Sequence:  Enzymatic Nucleic Acid
  misc_feature (31)..(31): n stands for inosine
cagcacuccugaugaggccguuaggccgaangccacca

SEQ ID NO: 3250 - RNA, 38 nt, Artificial Sequence
  Description of Artificial Sequence:  Enzymatic Nucleic Acid
  misc_feature (31)..(31): n stands for inosine
gccucugccugaugaggccguuaggccgaancacucgg

SEQ ID NO: 3251 - RNA, 38 nt, Artificial Sequence
  Description of Artificial Sequence:  Enzymatic Nucleic Acid
  misc_feature (31)..(31): n stands for inosine
acagccuccugaugaggccguuaggccgaancagcacu

SEQ ID NO: 3252 - RNA, 38 nt, Artificial Sequence
  Description of Artificial Sequence:  Enzymatic Nucleic Acid
  misc_feature (31)..(31): n stands for inosine
gcucgcaccugaugaggccguuaggccgaanccucugc

SEQ ID NO: 3253 - RNA, 38 nt, Artificial Sequence
  Description of Artificial Sequence:  Enzymatic Nucleic Acid
  misc_feature (31)..(31): n stands for inosine
cgaaggcccugaugaggccguuaggccgaancacguuc

SEQ ID NO: 3254 - RNA, 38 nt, Artificial Sequence
  Description of Artificial Sequence:  Enzymatic Nucleic Acid
  misc_feature (31)..(31): n stands for inosine
aagccgaacugaugaggccguuaggccgaanccagcac

SEQ ID NO: 3255 - RNA, 38 nt, Artificial Sequence
  Description of Artificial Sequence:  Enzymatic Nucleic Acid
  misc_feature (31)..(31): n stands for inosine
gaagccgacugaugaggccguuaggccgaangccagca

SEQ ID NO: 3256 - RNA, 38 nt, Artificial Sequence
  Description of Artificial Sequence:  Enzymatic Nucleic Acid
  misc_feature (31)..(31): n stands for inosine
cagcgcgacugaugaggccguuaggccgaanccgaagg

SEQ ID NO: 3257 - RNA, 38 nt, Artificial Sequence
  Description of Artificial Sequence:  Enzymatic Nucleic Acid
  misc_feature (31)..(31): n stands for inosine
cguccagccugaugaggccguuaggccgaancgcgaag

SEQ ID NO: 3258 - RNA, 38 nt, Artificial Sequence
  Description of Artificial Sequence:  Enzymatic Nucleic Acid
  misc_feature (31)..(31): n stands for inosine
ccccgucccugaugaggccguuaggccgaancagcgcg

SEQ ID NO: 3259 - RNA, 38 nt, Artificial Sequence
  Description of Artificial Sequence:  Enzymatic Nucleic Acid
  misc_feature (31)..(31): n stands for inosine
cccccgcgcugaugaggccguuaggccgaanccccguc

SEQ ID NO: 3260 - RNA, 38 nt, Artificial Sequence
  Description of Artificial Sequence:  Enzymatic Nucleic Acid
  misc_feature (31)..(31): n stands for inosine
gcccccgccugaugaggccguuaggccgaangccccgu

SEQ ID NO: 3261 - RNA, 38 nt, Artificial Sequence
  Description of Artificial Sequence:  Enzymatic Nucleic Acid
  misc_feature (31)..(31): n stands for inosine
cucgggggcugaugaggccguuaggccgaancccccgc

SEQ ID NO: 3262 - RNA, 38 nt, Artificial Sequence
  Description of Artificial Sequence:  Enzymatic Nucleic Acid
  misc_feature (31)..(31): n stands for inosine
ccucggggcugaugaggccguuaggccgaangcccccg

SEQ ID NO: 3263 - RNA, 38 nt, Artificial Sequence
  Description of Artificial Sequence:  Enzymatic Nucleic Acid
  misc_feature (31)..(31): n stands for inosine
gccucgggcugaugaggccguuaggccgaanggccccc

SEQ ID NO: 3264 - RNA, 38 nt, Artificial Sequence
  Description of Artificial Sequence:  Enzymatic Nucleic Acid
  misc_feature (31)..(31): n stands for inosine
ggccucggcugaugaggccguuaggccgaangggcccc

SEQ ID NO: 3265 - RNA, 38 nt, Artificial Sequence
  Description of Artificial Sequence:  Enzymatic Nucleic Acid
  misc_feature (31)..(31): n stands for inosine
aggccucgcugaugaggccguuaggccgaanggggccc

SEQ ID NO: 3266 - RNA, 38 nt, Artificial Sequence
  Description of Artificial Sequence:  Enzymatic Nucleic Acid
  misc_feature (31)..(31): n stands for inosine
aaggccuccugaugaggccguuaggccgaangggggcc

SEQ ID NO: 3267 - RNA, 38 nt, Artificial Sequence
  Description of Artificial Sequence:  Enzymatic Nucleic Acid
  misc_feature (31)..(31): n stands for inosine
guggugaacugaugaggccguuaggccgaanccucggg

SEQ ID NO: 3268 - RNA, 38 nt, Artificial Sequence
  Description of Artificial Sequence:  Enzymatic Nucleic Acid
  misc_feature (31)..(31): n stands for inosine
gguggugacugaugaggccguuaggccgaangccucgg

SEQ ID NO: 3269 - RNA, 38 nt, Artificial Sequence
  Description of Artificial Sequence:  Enzymatic Nucleic Acid
  misc_feature (31)..(31): n stands for inosine
gcugguggcugaugaggccguuaggccgaanaaggccu

SEQ ID NO: 3270 - RNA, 38 nt, Artificial Sequence
  Description of Artificial Sequence:  Enzymatic Nucleic Acid
  misc_feature (31)..(31): n stands for inosine
acgcuggucugaugaggccguuaggccgaanugaaggc

SEQ ID NO: 3271 - RNA, 38 nt, Artificial Sequence
  Description of Artificial Sequence:  Enzymatic Nucleic Acid
  misc_feature (31)..(31): n stands for inosine
cacgcuggcugaugaggccguuaggccgaangugaagg

SEQ ID NO: 3272 - RNA, 38 nt, Artificial Sequence
  Description of Artificial Sequence:  Enzymatic Nucleic Acid
  misc_feature (31)..(31): n stands for inosine
cgcacgcucugaugaggccguuaggccgaanuggugaa

SEQ ID NO: 3273 - RNA, 38 nt, Artificial Sequence
  Description of Artificial Sequence:  Enzymatic Nucleic Acid
  misc_feature (31)..(31): n stands for inosine
gcgcacgccugaugaggccguuaggccgaangugguga

SEQ ID NO: 3274 - RNA, 38 nt, Artificial Sequence
  Description of Artificial Sequence:  Enzymatic Nucleic Acid
  misc_feature (31)..(31): n stands for inosine
cagguagccugaugaggccguuaggccgaancgcacgc

SEQ ID NO: 3275 - RNA, 38 nt, Artificial Sequence
  Description of Artificial Sequence:  Enzymatic Nucleic Acid
  misc_feature (31)..(31): n stands for inosine
gggcaggucugaugaggccguuaggccgaancugcgca

SEQ ID NO: 3276 - RNA, 38 nt, Artificial Sequence
  Description of Artificial Sequence:  Enzymatic Nucleic Acid
  misc_feature (31)..(31): n stands for inosine
guugggcacugaugaggccguuaggccgaanuagcugc

SEQ ID NO: 3277 - RNA, 38 nt, Artificial Sequence
  Description of Artificial Sequence:  Enzymatic Nucleic Acid
  misc_feature (31)..(31): n stands for inosine
uguugggccugaugaggccguuaggccgaanguagcug

SEQ ID NO: 3278 - RNA, 38 nt, Artificial Sequence
  Description of Artificial Sequence:  Enzymatic Nucleic Acid
  misc_feature (31)..(31): n stands for inosine
ccguguugcugaugaggccguuaggccgaancagguag

SEQ ID NO: 3279 - RNA, 38 nt, Artificial Sequence
  Description of Artificial Sequence:  Enzymatic Nucleic Acid
  misc_feature (31)..(31): n stands for inosine
accguguucugaugaggccguuaggccgaangcaggua

SEQ ID NO: 3280 - RNA, 38 nt, Artificial Sequence
  Description of Artificial Sequence:  Enzymatic Nucleic Acid
  misc_feature (31)..(31): n stands for inosine
caccgugucugaugaggccguuaggccgaanggcaggu

SEQ ID NO: 3281 - RNA, 38 nt, Artificial Sequence
  Description of Artificial Sequence:  Enzymatic Nucleic Acid
  misc_feature (31)..(31): n stands for inosine
ggucaccgcugaugaggccguuaggccgaanuugggca

SEQ ID NO: 3282 - RNA, 38 nt, Artificial Sequence
  Description of Artificial Sequence:  Enzymatic Nucleic Acid
  misc_feature (31)..(31): n stands for inosine
agugcguccugaugaggccguuaggccgaanucaccgu

SEQ ID NO: 3283 - RNA, 38 nt, Artificial Sequence
  Description of Artificial Sequence:  Enzymatic Nucleic Acid
  misc_feature (31)..(31): n stands for inosine
ccccgcagcugaugaggccguuaggccgaancgucggu

SEQ ID NO: 3284 - RNA, 38 nt, Artificial Sequence
  Description of Artificial Sequence:  Enzymatic Nucleic Acid
  misc_feature (31)..(31): n stands for inosine
ucccccgccugaugaggccguuaggccgaanugcgucg

SEQ ID NO: 3285 - RNA, 38 nt, Artificial Sequence
  Description of Artificial Sequence:  Enzymatic Nucleic Acid
  misc_feature (31)..(31): n stands for inosine
gcagcagccugaugaggccguuaggccgaancccccac

SEQ ID NO: 3286 - RNA, 38 nt, Artificial Sequence
  Description of Artificial Sequence:  Enzymatic Nucleic Acid
  misc_feature (31)..(31): n stands for inosine
ggcgcagccugaugaggccguuaggccgaancagcccc

SEQ ID NO: 3287 - RNA, 38 nt, Artificial Sequence
  Description of Artificial Sequence:  Enzymatic Nucleic Acid
  misc_feature (31)..(31): n stands for inosine
cgcggcgccugaugaggccguuaggccgaancagcagc

SEQ ID NO: 3288 - RNA, 38 nt, Artificial Sequence
  Description of Artificial Sequence:  Enzymatic Nucleic Acid
  misc_feature (31)..(31): n stands for inosine
gcccacgccugaugaggccguuaggccgaancgcagca

SEQ ID NO: 3289 - RNA, 38 nt, Artificial Sequence
  Description of Artificial Sequence:  Enzymatic Nucleic Acid
  misc_feature (31)..(31): n stands for inosine
ggugaacccugaugaggccguuaggccgaancacgucg

SEQ ID NO: 3290 - RNA, 38 nt, Artificial Sequence
  Description of Artificial Sequence:  Enzymatic Nucleic Acid
  misc_feature (31)..(31): n stands for inosine
ccagcaggcugaugaggccguuaggccgaanaaccagc

SEQ ID NO: 3291 - RNA, 38 nt, Artificial Sequence
  Description of Artificial Sequence:  Enzymatic Nucleic Acid
  misc_feature (31)..(31): n stands for inosine
ugccagcacugaugaggccguuaggccgaanugaacca

SEQ ID NO: 3292 - RNA, 38 nt, Artificial Sequence
  Description of Artificial Sequence:  Enzymatic Nucleic Acid
  misc_feature (31)..(31): n stands for inosine
gugccagccugaugaggccguuaggccgaangugaacc

SEQ ID NO: 3293 - RNA, 38 nt, Artificial Sequence
  Description of Artificial Sequence:  Enzymatic Nucleic Acid
  misc_feature (31)..(31): n stands for inosine
agcgugcccugaugaggccguuaggccgaancagguga

SEQ ID NO: 3294 - RNA, 38 nt, Artificial Sequence
  Description of Artificial Sequence:  Enzymatic Nucleic Acid
  misc_feature (31)..(31): n stands for inosine
gcgcagcgcugaugaggccguuaggccgaanccagcag

SEQ ID NO: 3295 - RNA, 38 nt, Artificial Sequence
  Description of Artificial Sequence:  Enzymatic Nucleic Acid
  misc_feature (31)..(31): n stands for inosine
gagcgcgccugaugaggccguuaggccgaancgugcca

SEQ ID NO: 3296 - RNA, 38 nt, Artificial Sequence
  Description of Artificial Sequence:  Enzymatic Nucleic Acid
  misc_feature (31)..(31): n stands for inosine
gcacaaagcugaugaggccguuaggccgaancgcgcag

SEQ ID NO: 3297 - RNA, 38 nt, Artificial Sequence
  Description of Artificial Sequence:  Enzymatic Nucleic Acid
  misc_feature (31)..(31): n stands for inosine
cagcacaacugaugaggccguuaggccgaanagcgcgc

SEQ ID NO: 3298 - RNA, 38 nt, Artificial Sequence
  Description of Artificial Sequence:  Enzymatic Nucleic Acid
  misc_feature (31)..(31): n stands for inosine
gagccacccugaugaggccguuaggccgaancacaaag

SEQ ID NO: 3299 - RNA, 38 nt, Artificial Sequence
  Description of Artificial Sequence:  Enzymatic Nucleic Acid
  misc_feature (31)..(31): n stands for inosine
cagcugggcugaugaggccguuaggccgaanccaccag

SEQ ID NO: 3300 - RNA, 38 nt, Artificial Sequence
  Description of Artificial Sequence:  Enzymatic Nucleic Acid
  misc_feature (31)..(31): n stands for inosine
cgcagcugcugaugaggccguuaggccgaanagccacc

SEQ ID NO: 3301 - RNA, 38 nt, Artificial Sequence
  Description of Artificial Sequence:  Enzymatic Nucleic Acid
  misc_feature (31)..(31): n stands for inosine
gcgcagcucugaugaggccguuaggccgaangagccac

SEQ ID NO: 3302 - RNA, 38 nt, Artificial Sequence
  Description of Artificial Sequence:  Enzymatic Nucleic Acid
  misc_feature (31)..(31): n stands for inosine
ggcgcagccugaugaggccguuaggccgaanggagcca

SEQ ID NO: 3303 - RNA, 38 nt, Artificial Sequence
  Description of Artificial Sequence:  Enzymatic Nucleic Acid
  misc_feature (31)..(31): n stands for inosine
guaggcgccugaugaggccguuaggccgaancugggag

SEQ ID NO: 3304 - RNA, 38 nt, Artificial Sequence
  Description of Artificial Sequence:  Enzymatic Nucleic Acid
  misc_feature (31)..(31): n stands for inosine
accugguacugaugaggccguuaggccgaancgcagcu

SEQ ID NO: 3305 - RNA, 38 nt, Artificial Sequence
  Description of Artificial Sequence:  Enzymatic Nucleic Acid
  misc_feature (31)..(31): n stands for inosine
caccuggucugaugaggccguuaggccgaangcgcagc

SEQ ID NO: 3306 - RNA, 38 nt, Artificial Sequence
  Description of Artificial Sequence:  Enzymatic Nucleic Acid
  misc_feature (31)..(31): n stands for inosine
gcacaccucugaugaggccguuaggccgaanuaggcgc

SEQ ID NO: 3307 - RNA, 38 nt, Artificial Sequence
  Description of Artificial Sequence:  Enzymatic Nucleic Acid
  misc_feature (31)..(31): n stands for inosine
cgcacacccugaugaggccguuaggccgaanguaggcg

SEQ ID NO: 3308 - RNA, 38 nt, Artificial Sequence
  Description of Artificial Sequence:  Enzymatic Nucleic Acid
  misc_feature (31)..(31): n stands for inosine
acagcggccugaugaggccguuaggccgaancccgcac

SEQ ID NO: 3309 - RNA, 38 nt, Artificial Sequence
  Description of Artificial Sequence:  Enzymatic Nucleic Acid
  misc_feature (31)..(31): n stands for inosine
gguacagccugaugaggccguuaggccgaancggcccg

SEQ ID NO: 3310 - RNA, 38 nt, Artificial Sequence
  Description of Artificial Sequence:  Enzymatic Nucleic Acid
  misc_feature (31)..(31): n stands for inosine
gcugguaccugaugaggccguuaggccgaancggcggc

SEQ ID NO: 3311 - RNA, 38 nt, Artificial Sequence
  Description of Artificial Sequence:  Enzymatic Nucleic Acid
  misc_feature (31)..(31): n stands for inosine
gccgagcucugaugaggccguuaggccgaanuacagcg

SEQ ID NO: 3312 - RNA, 38 nt, Artificial Sequence
  Description of Artificial Sequence:  Enzymatic Nucleic Acid
  misc_feature (31)..(31): n stands for inosine
cgccgagccugaugaggccguuaggccgaanguacagc

SEQ ID NO: 3313 - RNA, 38 nt, Artificial Sequence
  Description of Artificial Sequence:  Enzymatic Nucleic Acid
  misc_feature (31)..(31): n stands for inosine
cagcgccgcugaugaggccguuaggccgaancugguac

SEQ ID NO: 3314 - RNA, 38 nt, Artificial Sequence
  Description of Artificial Sequence:  Enzymatic Nucleic Acid
  misc_feature (31)..(31): n stands for inosine
ugaguggccugaugaggccguuaggccgaancgccgag

SEQ ID NO: 3315 - RNA, 38 nt, Artificial Sequence
  Description of Artificial Sequence:  Enzymatic Nucleic Acid
  misc_feature (31)..(31): n stands for inosine
gccugagucugaugaggccguuaggccgaancagcgcc

SEQ ID NO: 3316 - RNA, 38 nt, Artificial Sequence
  Description of Artificial Sequence:  Enzymatic Nucleic Acid
  misc_feature (31)..(31): n stands for inosine
ggccugagcugaugaggccguuaggccgaangcagcgc

SEQ ID NO: 3317 - RNA, 38 nt, Artificial Sequence
  Description of Artificial Sequence:  Enzymatic Nucleic Acid
  misc_feature (31)..(31): n stands for inosine
cgggccugcugaugaggccguuaggccgaanuggcagc

SEQ ID NO: 3318 - RNA, 38 nt, Artificial Sequence
  Description of Artificial Sequence:  Enzymatic Nucleic Acid
  misc_feature (31)..(31): n stands for inosine
gccgggcccugaugaggccguuaggccgaanaguggca

SEQ ID NO: 3319 - RNA, 38 nt, Artificial Sequence
  Description of Artificial Sequence:  Enzymatic Nucleic Acid
  misc_feature (31)..(31): n stands for inosine
gggggccgcugaugaggccguuaggccgaanccugagu

SEQ ID NO: 3320 - RNA, 38 nt, Artificial Sequence
  Description of Artificial Sequence:  Enzymatic Nucleic Acid
  misc_feature (31)..(31): n stands for inosine
cgggggcccugaugaggccguuaggccgaangccugag

SEQ ID NO: 3321 - RNA, 38 nt, Artificial Sequence
  Description of Artificial Sequence:  Enzymatic Nucleic Acid
  misc_feature (31)..(31): n stands for inosine
guggcgggcugaugaggccguuaggccgaanccgggcc

SEQ ID NO: 3322 - RNA, 38 nt, Artificial Sequence
  Description of Artificial Sequence:  Enzymatic Nucleic Acid
  misc_feature (31)..(31): n stands for inosine
uguggcggcugaugaggccguuaggccgaangccgggc

SEQ ID NO: 3323 - RNA, 38 nt, Artificial Sequence
  Description of Artificial Sequence:  Enzymatic Nucleic Acid
  misc_feature (31)..(31): n stands for inosine
guguggcgcugaugaggccguuaggccgaanggccggg

SEQ ID NO: 3324 - RNA, 38 nt, Artificial Sequence
  Description of Artificial Sequence:  Enzymatic Nucleic Acid
  misc_feature (31)..(31): n stands for inosine
cguguggccugaugaggccguuaggccgaangggccgg

SEQ ID NO: 3325 - RNA, 38 nt, Artificial Sequence
  Description of Artificial Sequence:  Enzymatic Nucleic Acid
  misc_feature (31)..(31): n stands for inosine
uagcgugucugaugaggccguuaggccgaancgggggc

SEQ ID NO: 3326 - RNA, 38 nt, Artificial Sequence
  Description of Artificial Sequence:  Enzymatic Nucleic Acid
  misc_feature (31)..(31): n stands for inosine
cuagcgugcugaugaggccguuaggccgaangcggggg

SEQ ID NO: 3327 - RNA, 38 nt, Artificial Sequence
  Description of Artificial Sequence:  Enzymatic Nucleic Acid
  misc_feature (31)..(31): n stands for inosine
cacuagcgcugaugaggccguuaggccgaanuggcggg

SEQ ID NO: 3328 - RNA, 38 nt, Artificial Sequence
  Description of Artificial Sequence:  Enzymatic Nucleic Acid
  misc_feature (31)..(31): n stands for inosine
gguccacucugaugaggccguuaggccgaancgugugg

SEQ ID NO: 3329 - RNA, 38 nt, Artificial Sequence
  Description of Artificial Sequence:  Enzymatic Nucleic Acid
  misc_feature (31)..(31): n stands for inosine
gccuucggcugaugaggccguuaggccgaanuccacua

SEQ ID NO: 3330 - RNA, 38 nt, Artificial Sequence
  Description of Artificial Sequence:  Enzymatic Nucleic Acid
  misc_feature (31)..(31): n stands for inosine
cgccuucgcugaugaggccguuaggccgaanguccacu

SEQ ID NO: 3331 - RNA, 38 nt, Artificial Sequence
  Description of Artificial Sequence:  Enzymatic Nucleic Acid
  misc_feature (31)..(31): n stands for inosine
acgccuuccugaugaggccguuaggccgaangguccac

SEQ ID NO: 3332 - RNA, 38 nt, Artificial Sequence
  Description of Artificial Sequence:  Enzymatic Nucleic Acid
  misc_feature (31)..(31): n stands for inosine
cgcauccccugaugaggccguuaggccgaanacgccuu

SEQ ID NO: 3333 - RNA, 38 nt, Artificial Sequence
  Description of Artificial Sequence:  Enzymatic Nucleic Acid
  misc_feature (31)..(31): n stands for inosine
ugguuccacugaugaggccguuaggccgaancccguuc

SEQ ID NO: 3334 - RNA, 38 nt, Artificial Sequence
  Description of Artificial Sequence:  Enzymatic Nucleic Acid
  misc_feature (31)..(31): n stands for inosine
augguucccugaugaggccguuaggccgaangcccguu

SEQ ID NO: 3335 - RNA, 38 nt, Artificial Sequence
  Description of Artificial Sequence:  Enzymatic Nucleic Acid
  misc_feature (31)..(31): n stands for inosine
gacgcuaucugaugaggccguuaggccgaanuuccagg

SEQ ID NO: 3336 - RNA, 38 nt, Artificial Sequence
  Description of Artificial Sequence:  Enzymatic Nucleic Acid
  misc_feature (31)..(31): n stands for inosine
ugacgcuacugaugaggccguuaggccgaanguuccag

SEQ ID NO: 3337 - RNA, 38 nt, Artificial Sequence
  Description of Artificial Sequence:  Enzymatic Nucleic Acid
  misc_feature (31)..(31): n stands for inosine
ggccuccccugaugaggccguuaggccgaanacgcuau

SEQ ID NO: 3338 - RNA, 38 nt, Artificial Sequence
  Description of Artificial Sequence:  Enzymatic Nucleic Acid
  misc_feature (31)..(31): n stands for inosine
gggacccccugaugaggccguuaggccgaanccucccu

SEQ ID NO: 3339 - RNA, 38 nt, Artificial Sequence
  Description of Artificial Sequence:  Enzymatic Nucleic Acid
  misc_feature (31)..(31): n stands for inosine
gcccagggcugaugaggccguuaggccgaanaccccgg

SEQ ID NO: 3340 - RNA, 38 nt, Artificial Sequence
  Description of Artificial Sequence:  Enzymatic Nucleic Acid
  misc_feature (31)..(31): n stands for inosine
ggcccaggcugaugaggccguuaggccgaangaccccg

SEQ ID NO: 3341 - RNA, 38 nt, Artificial Sequence
  Description of Artificial Sequence:  Enzymatic Nucleic Acid
  misc_feature (31)..(31): n stands for inosine
aggcccagcugaugaggccguuaggccgaanggacccc

SEQ ID NO: 3342 - RNA, 38 nt, Artificial Sequence
  Description of Artificial Sequence:  Enzymatic Nucleic Acid
  misc_feature (31)..(31): n stands for inosine
caggcccacugaugaggccguuaggccgaangggaccc

SEQ ID NO: 3343 - RNA, 38 nt, Artificial Sequence
  Description of Artificial Sequence:  Enzymatic Nucleic Acid
  misc_feature (31)..(31): n stands for inosine
gcaggccccugaugaggccguuaggccgaanggggacc

SEQ ID NO: 3344 - RNA, 38 nt, Artificial Sequence
  Description of Artificial Sequence:  Enzymatic Nucleic Acid
  misc_feature (31)..(31): n stands for inosine
ggcuggcacugaugaggccguuaggccgaancccaggg

SEQ ID NO: 3345 - RNA, 38 nt, Artificial Sequence
  Description of Artificial Sequence:  Enzymatic Nucleic Acid
  misc_feature (31)..(31): n stands for inosine
gggcuggccugaugaggccguuaggccgaangcccagg

SEQ ID NO: 3346 - RNA, 38 nt, Artificial Sequence
  Description of Artificial Sequence:  Enzymatic Nucleic Acid
  misc_feature (31)..(31): n stands for inosine
ccggggcucugaugaggccguuaggccgaancaggccc

SEQ ID NO: 3347 - RNA, 38 nt, Artificial Sequence
  Description of Artificial Sequence:  Enzymatic Nucleic Acid
  misc_feature (31)..(31): n stands for inosine
cccggggccugaugaggccguuaggccgaangcaggcc

SEQ ID NO: 3348 - RNA, 38 nt, Artificial Sequence
  Description of Artificial Sequence:  Enzymatic Nucleic Acid
  misc_feature (31)..(31): n stands for inosine
gcacccggcugaugaggccguuaggccgaancuggcag

SEQ ID NO: 3349 - RNA, 38 nt, Artificial Sequence
  Description of Artificial Sequence:  Enzymatic Nucleic Acid
  misc_feature (31)..(31): n stands for inosine
cgcacccgcugaugaggccguuaggccgaangcuggca

SEQ ID NO: 3350 - RNA, 38 nt, Artificial Sequence
  Description of Artificial Sequence:  Enzymatic Nucleic Acid
  misc_feature (31)..(31): n stands for inosine
ucgcaccccugaugaggccguuaggccgaanggcuggc

SEQ ID NO: 3351 - RNA, 38 nt, Artificial Sequence
  Description of Artificial Sequence:  Enzymatic Nucleic Acid
  misc_feature (31)..(31): n stands for inosine
gcuggcaccugaugaggccguuaggccgaancccccgc

SEQ ID NO: 3352 - RNA, 38 nt, Artificial Sequence
  Description of Artificial Sequence:  Enzymatic Nucleic Acid
  misc_feature (31)..(31): n stands for inosine
cuucggcucugaugaggccguuaggccgaancacugcc

SEQ ID NO: 3353 - RNA, 38 nt, Artificial Sequence
  Description of Artificial Sequence:  Enzymatic Nucleic Acid
  misc_feature (31)..(31): n stands for inosine
acuucggccugaugaggccguuaggccgaangcacugc

SEQ ID NO: 3354 - RNA, 38 nt, Artificial Sequence
  Description of Artificial Sequence:  Enzymatic Nucleic Acid
  misc_feature (31)..(31): n stands for inosine
cagacuuccugaugaggccguuaggccgaancuggcac

SEQ ID NO: 3355 - RNA, 38 nt, Artificial Sequence
  Description of Artificial Sequence:  Enzymatic Nucleic Acid
  misc_feature (31)..(31): n stands for inosine
gcaacggccugaugaggccguuaggccgaanacuucgg

SEQ ID NO: 3356 - RNA, 38 nt, Artificial Sequence
  Description of Artificial Sequence:  Enzymatic Nucleic Acid
  misc_feature (31)..(31): n stands for inosine
ugggcaaccugaugaggccguuaggccgaancagacuu

SEQ ID NO: 3357 - RNA, 38 nt, Artificial Sequence
  Description of Artificial Sequence:  Enzymatic Nucleic Acid
  misc_feature (31)..(31): n stands for inosine
gccucuugcugaugaggccguuaggccgaancaacggc

SEQ ID NO: 3358 - RNA, 38 nt, Artificial Sequence
  Description of Artificial Sequence:  Enzymatic Nucleic Acid
  misc_feature (31)..(31): n stands for inosine
ggccucuucugaugaggccguuaggccgaangcaacgg

SEQ ID NO: 3359 - RNA, 38 nt, Artificial Sequence
  Description of Artificial Sequence:  Enzymatic Nucleic Acid
  misc_feature (31)..(31): n stands for inosine
gggccucucugaugaggccguuaggccgaanggcaacg

SEQ ID NO: 3360 - RNA, 38 nt, Artificial Sequence
  Description of Artificial Sequence:  Enzymatic Nucleic Acid
  misc_feature (31)..(31): n stands for inosine
cacgccugcugaugaggccguuaggccgaanccucuug

SEQ ID NO: 3361 - RNA, 38 nt, Artificial Sequence
  Description of Artificial Sequence:  Enzymatic Nucleic Acid
  misc_feature (31)..(31): n stands for inosine
ccacgccucugaugaggccguuaggccgaangccucuu

SEQ ID NO: 3362 - RNA, 38 nt, Artificial Sequence
  Description of Artificial Sequence:  Enzymatic Nucleic Acid
  misc_feature (31)..(31): n stands for inosine
gccacgcccugaugaggccguuaggccgaanggccucu

SEQ ID NO: 3363 - RNA, 38 nt, Artificial Sequence
  Description of Artificial Sequence:  Enzymatic Nucleic Acid
  misc_feature (31)..(31): n stands for inosine
ucaggggccugaugaggccguuaggccgaancgccacg

SEQ ID NO: 3364 - RNA, 38 nt, Artificial Sequence
  Description of Artificial Sequence:  Enzymatic Nucleic Acid
  misc_feature (31)..(31): n stands for inosine
ggcucaggcugaugaggccguuaggccgaancagcgcc

SEQ ID NO: 3365 - RNA, 38 nt, Artificial Sequence
  Description of Artificial Sequence:  Enzymatic Nucleic Acid
  misc_feature (31)..(31): n stands for inosine
cggcucagcugaugaggccguuaggccgaangcagcgc

SEQ ID NO: 3366 - RNA, 38 nt, Artificial Sequence
  Description of Artificial Sequence:  Enzymatic Nucleic Acid
  misc_feature (31)..(31): n stands for inosine
ccggcucacugaugaggccguuaggccgaanggcagcg

SEQ ID NO: 3367 - RNA, 38 nt, Artificial Sequence
  Description of Artificial Sequence:  Enzymatic Nucleic Acid
  misc_feature (31)..(31): n stands for inosine
uccggcuccugaugaggccguuaggccgaangggcagc

SEQ ID NO: 3368 - RNA, 38 nt, Artificial Sequence
  Description of Artificial Sequence:  Enzymatic Nucleic Acid
  misc_feature (31)..(31): n stands for inosine
uccgcucccugaugaggccguuaggccgaancucaggg

SEQ ID NO: 3369 - RNA, 38 nt, Artificial Sequence
  Description of Artificial Sequence:  Enzymatic Nucleic Acid
  misc_feature (31)..(31): n stands for inosine
gcccaacgcugaugaggccguuaggccgaancguccgc

SEQ ID NO: 3370 - RNA, 38 nt, Artificial Sequence
  Description of Artificial Sequence:  Enzymatic Nucleic Acid
  misc_feature (31)..(31): n stands for inosine
ugcccaaccugaugaggccguuaggccgaangcguccg

SEQ ID NO: 3371 - RNA, 38 nt, Artificial Sequence
  Description of Artificial Sequence:  Enzymatic Nucleic Acid
  misc_feature (31)..(31): n stands for inosine
aggacccccugaugaggccguuaggccgaancccaacg

SEQ ID NO: 3372 - RNA, 38 nt, Artificial Sequence
  Description of Artificial Sequence:  Enzymatic Nucleic Acid
  misc_feature (31)..(31): n stands for inosine
ugggcccacugaugaggccguuaggccgaanaccccug

SEQ ID NO: 3373 - RNA, 38 nt, Artificial Sequence
  Description of Artificial Sequence:  Enzymatic Nucleic Acid
  misc_feature (31)..(31): n stands for inosine
gugggccccugaugaggccguuaggccgaangaccccu

SEQ ID NO: 3374 - RNA, 38 nt, Artificial Sequence
  Description of Artificial Sequence:  Enzymatic Nucleic Acid
  misc_feature (31)..(31): n stands for inosine
cccgggugcugaugaggccguuaggccgaancccagga

SEQ ID NO: 3375 - RNA, 38 nt, Artificial Sequence
  Description of Artificial Sequence:  Enzymatic Nucleic Acid
  misc_feature (31)..(31): n stands for inosine
gcccgggucugaugaggccguuaggccgaangcccagg

SEQ ID NO: 3376 - RNA, 38 nt, Artificial Sequence
  Description of Artificial Sequence:  Enzymatic Nucleic Acid
  misc_feature (31)..(31): n stands for inosine
ugcccgggcugaugaggccguuaggccgaanggcccag

SEQ ID NO: 3377 - RNA, 38 nt, Artificial Sequence
  Description of Artificial Sequence:  Enzymatic Nucleic Acid
  misc_feature (31)..(31): n stands for inosine
ccugcccgcugaugaggccguuaggccgaanugggccc

SEQ ID NO: 3378 - RNA, 38 nt, Artificial Sequence
  Description of Artificial Sequence:  Enzymatic Nucleic Acid
  misc_feature (31)..(31): n stands for inosine
uccugccccugaugaggccguuaggccgaangugggcc

SEQ ID NO: 3379 - RNA, 38 nt, Artificial Sequence
  Description of Artificial Sequence:  Enzymatic Nucleic Acid
  misc_feature (31)..(31): n stands for inosine
acgcgucccugaugaggccguuaggccgaancccgggu

SEQ ID NO: 3380 - RNA, 38 nt, Artificial Sequence
  Description of Artificial Sequence:  Enzymatic Nucleic Acid
  misc_feature (31)..(31): n stands for inosine
ggucacuccugaugaggccguuaggccgaanuccacgc

SEQ ID NO: 3381 - RNA, 38 nt, Artificial Sequence
  Description of Artificial Sequence:  Enzymatic Nucleic Acid
  misc_feature (31)..(31): n stands for inosine
gaaaccaccugaugaggccguuaggccgaanucacucg

SEQ ID NO: 3382 - RNA, 38 nt, Artificial Sequence
  Description of Artificial Sequence:  Enzymatic Nucleic Acid
  misc_feature (31)..(31): n stands for inosine
caccacaccugaugaggccguuaggccgaanaaaccac

SEQ ID NO: 3383 - RNA, 38 nt, Artificial Sequence
  Description of Artificial Sequence:  Enzymatic Nucleic Acid
  misc_feature (31)..(31): n stands for inosine
cuggcaggcugaugaggccguuaggccgaanacaccac

SEQ ID NO: 3384 - RNA, 38 nt, Artificial Sequence
  Description of Artificial Sequence:  Enzymatic Nucleic Acid
  misc_feature (31)..(31): n stands for inosine
gucuggcacugaugaggccguuaggccgaanugacacc

SEQ ID NO: 3385 - RNA, 38 nt, Artificial Sequence
  Description of Artificial Sequence:  Enzymatic Nucleic Acid
  misc_feature (31)..(31): n stands for inosine
ggucuggccugaugaggccguuaggccgaangugacac

SEQ ID NO: 3386 - RNA, 38 nt, Artificial Sequence
  Description of Artificial Sequence:  Enzymatic Nucleic Acid
  misc_feature (31)..(31): n stands for inosine
gcgggucucugaugaggccguuaggccgaancagguga

SEQ ID NO: 3387 - RNA, 38 nt, Artificial Sequence
  Description of Artificial Sequence:  Enzymatic Nucleic Acid
  misc_feature (31)..(31): n stands for inosine
ggcggguccugaugaggccguuaggccgaangcaggug

SEQ ID NO: 3388 - RNA, 38 nt, Artificial Sequence
  Description of Artificial Sequence:  Enzymatic Nucleic Acid
  misc_feature (31)..(31): n stands for inosine
cuucggcgcugaugaggccguuaggccgaanucuggca

SEQ ID NO: 3389 - RNA, 38 nt, Artificial Sequence
  Description of Artificial Sequence:  Enzymatic Nucleic Acid
  misc_feature (31)..(31): n stands for inosine
ucuucggccugaugaggccguuaggccgaangucuggc

SEQ ID NO: 3390 - RNA, 38 nt, Artificial Sequence
  Description of Artificial Sequence:  Enzymatic Nucleic Acid
  misc_feature (31)..(31): n stands for inosine
gcuucuuccugaugaggccguuaggccgaancgggucu

SEQ ID NO: 3391 - RNA, 38 nt, Artificial Sequence
  Description of Artificial Sequence:  Enzymatic Nucleic Acid
  misc_feature (31)..(31): n stands for inosine
aaagaggucugaugaggccguuaggccgaancuucuuc

SEQ ID NO: 3392 - RNA, 38 nt, Artificial Sequence
  Description of Artificial Sequence:  Enzymatic Nucleic Acid
  misc_feature (31)..(31): n stands for inosine
caaagaggcugaugaggccguuaggccgaangcuucuu

SEQ ID NO: 3393 - RNA, 38 nt, Artificial Sequence
  Description of Artificial Sequence:  Enzymatic Nucleic Acid
  misc_feature (31)..(31): n stands for inosine
uccaaagacugaugaggccguuaggccgaanuggcuuc

SEQ ID NO: 3394 - RNA, 38 nt, Artificial Sequence
  Description of Artificial Sequence:  Enzymatic Nucleic Acid
  misc_feature (31)..(31): n stands for inosine
cuccaaagcugaugaggccguuaggccgaanguggcuu

SEQ ID NO: 3395 - RNA, 38 nt, Artificial Sequence
  Description of Artificial Sequence:  Enzymatic Nucleic Acid
  misc_feature (31)..(31): n stands for inosine
cccuccaacugaugaggccguuaggccgaanagguggc

SEQ ID NO: 3396 - RNA, 38 nt, Artificial Sequence
  Description of Artificial Sequence:  Enzymatic Nucleic Acid
  misc_feature (31)..(31): n stands for inosine
ugccagagcugaugaggccguuaggccgaancgcaccc

SEQ ID NO: 3397 - RNA, 38 nt, Artificial Sequence
  Description of Artificial Sequence:  Enzymatic Nucleic Acid
  misc_feature (31)..(31): n stands for inosine
cgugccagcugaugaggccguuaggccgaanagcgcac

SEQ ID NO: 3398 - RNA, 38 nt, Artificial Sequence
  Description of Artificial Sequence:  Enzymatic Nucleic Acid
  misc_feature (31)..(31): n stands for inosine
cgcgugcccugaugaggccguuaggccgaanagagcgc

SEQ ID NO: 3399 - RNA, 38 nt, Artificial Sequence
  Description of Artificial Sequence:  Enzymatic Nucleic Acid
  misc_feature (31)..(31): n stands for inosine
guggcgcgcugaugaggccguuaggccgaanccagaga

SEQ ID NO: 3400 - RNA, 38 nt, Artificial Sequence
  Description of Artificial Sequence:  Enzymatic Nucleic Acid
  misc_feature (31)..(31): n stands for inosine
gugggagucugaugaggccguuaggccgaancgcgugc

SEQ ID NO: 3401 - RNA, 38 nt, Artificial Sequence
  Description of Artificial Sequence:  Enzymatic Nucleic Acid
  misc_feature (31)..(31): n stands for inosine
ggugggagcugaugaggccguuaggccgaangcgcgug

SEQ ID NO: 3402 - RNA, 38 nt, Artificial Sequence
  Description of Artificial Sequence:  Enzymatic Nucleic Acid
  misc_feature (31)..(31): n stands for inosine
ugggugggcugaugaggccguuaggccgaanuggcgcg

SEQ ID NO: 3403 - RNA, 38 nt, Artificial Sequence
  Description of Artificial Sequence:  Enzymatic Nucleic Acid
  misc_feature (31)..(31): n stands for inosine
gaugggugcugaugaggccguuaggccgaanaguggcg

SEQ ID NO: 3404 - RNA, 38 nt, Artificial Sequence
  Description of Artificial Sequence:  Enzymatic Nucleic Acid
  misc_feature (31)..(31): n stands for inosine
ggaugggucugaugaggccguuaggccgaangaguggc

SEQ ID NO: 3405 - RNA, 38 nt, Artificial Sequence
  Description of Artificial Sequence:  Enzymatic Nucleic Acid
  misc_feature (31)..(31): n stands for inosine
cggaugggcugaugaggccguuaggccgaanggagugg

SEQ ID NO: 3406 - RNA, 38 nt, Artificial Sequence
  Description of Artificial Sequence:  Enzymatic Nucleic Acid
  misc_feature (31)..(31): n stands for inosine
cacggaugcugaugaggccguuaggccgaanugggagu

SEQ ID NO: 3407 - RNA, 38 nt, Artificial Sequence
  Description of Artificial Sequence:  Enzymatic Nucleic Acid
  misc_feature (31)..(31): n stands for inosine
ccacggaucugaugaggccguuaggccgaangugggag

SEQ ID NO: 3408 - RNA, 38 nt, Artificial Sequence
  Description of Artificial Sequence:  Enzymatic Nucleic Acid
  misc_feature (31)..(31): n stands for inosine
cccacggacugaugaggccguuaggccgaangguggga

SEQ ID NO: 3409 - RNA, 38 nt, Artificial Sequence
  Description of Artificial Sequence:  Enzymatic Nucleic Acid
  misc_feature (31)..(31): n stands for inosine
cggcccaccugaugaggccguuaggccgaanaugggug

SEQ ID NO: 3410 - RNA, 38 nt, Artificial Sequence
  Description of Artificial Sequence:  Enzymatic Nucleic Acid
  misc_feature (31)..(31): n stands for inosine
gugcuggccugaugaggccguuaggccgaancccacgg

SEQ ID NO: 3411 - RNA, 38 nt, Artificial Sequence
  Description of Artificial Sequence:  Enzymatic Nucleic Acid
  misc_feature (31)..(31): n stands for inosine
guggugcucugaugaggccguuaggccgaancggccca

SEQ ID NO: 3412 - RNA, 38 nt, Artificial Sequence
  Description of Artificial Sequence:  Enzymatic Nucleic Acid
  misc_feature (31)..(31): n stands for inosine
cguggugccugaugaggccguuaggccgaangcggccc

SEQ ID NO: 3413 - RNA, 38 nt, Artificial Sequence
  Description of Artificial Sequence:  Enzymatic Nucleic Acid
  misc_feature (31)..(31): n stands for inosine
ccgcguggcugaugaggccguuaggccgaancuggcgg

SEQ ID NO: 3414 - RNA, 38 nt, Artificial Sequence
  Description of Artificial Sequence:  Enzymatic Nucleic Acid
  misc_feature (31)..(31): n stands for inosine
gcccgcgucugaugaggccguuaggccgaanugcuggc

SEQ ID NO: 3415 - RNA, 38 nt, Artificial Sequence
  Description of Artificial Sequence:  Enzymatic Nucleic Acid
  misc_feature (31)..(31): n stands for inosine
ggcccgcgcugaugaggccguuaggccgaangugcugg

SEQ ID NO: 3416 - RNA, 38 nt, Artificial Sequence
  Description of Artificial Sequence:  Enzymatic Nucleic Acid
  misc_feature (31)..(31): n stands for inosine
ggauggggcugaugaggccguuaggccgaancccgcgu

SEQ ID NO: 3417 - RNA, 38 nt, Artificial Sequence
  Description of Artificial Sequence:  Enzymatic Nucleic Acid
  misc_feature (31)..(31): n stands for inosine
uggaugggcugaugaggccguuaggccgaangcccgcg

SEQ ID NO: 3418 - RNA, 38 nt, Artificial Sequence
  Description of Artificial Sequence:  Enzymatic Nucleic Acid
  misc_feature (31)..(31): n stands for inosine
guggauggcugaugaggccguuaggccgaanggcccgc

SEQ ID NO: 3419 - RNA, 38 nt, Artificial Sequence
  Description of Artificial Sequence:  Enzymatic Nucleic Acid
  misc_feature (31)..(31): n stands for inosine
uguggaugcugaugaggccguuaggccgaangggcccg

SEQ ID NO: 3420 - RNA, 38 nt, Artificial Sequence
  Description of Artificial Sequence:  Enzymatic Nucleic Acid
  misc_feature (31)..(31): n stands for inosine
auguggaucugaugaggccguuaggccgaanggggccc

SEQ ID NO: 3421 - RNA, 38 nt, Artificial Sequence
  Description of Artificial Sequence:  Enzymatic Nucleic Acid
  misc_feature (31)..(31): n stands for inosine
gauguggacugaugaggccguuaggccgaangggggcc

SEQ ID NO: 3422 - RNA, 38 nt, Artificial Sequence
  Description of Artificial Sequence:  Enzymatic Nucleic Acid
  misc_feature (31)..(31): n stands for inosine
cgcgaugucugaugaggccguuaggccgaanauggggg

SEQ ID NO: 3423 - RNA, 38 nt, Artificial Sequence
  Description of Artificial Sequence:  Enzymatic Nucleic Acid
  misc_feature (31)..(31): n stands for inosine
ccgcgaugcugaugaggccguuaggccgaangaugggg

SEQ ID NO: 3424 - RNA, 38 nt, Artificial Sequence
  Description of Artificial Sequence:  Enzymatic Nucleic Acid
  misc_feature (31)..(31): n stands for inosine
ggccgcgacugaugaggccguuaggccgaanuggaugg

SEQ ID NO: 3425 - RNA, 38 nt, Artificial Sequence
  Description of Artificial Sequence:  Enzymatic Nucleic Acid
  misc_feature (31)..(31): n stands for inosine
gacguggucugaugaggccguuaggccgaanccgcgau

SEQ ID NO: 3426 - RNA, 38 nt, Artificial Sequence
  Description of Artificial Sequence:  Enzymatic Nucleic Acid
  misc_feature (31)..(31): n stands for inosine
ggacguggcugaugaggccguuaggccgaangccgcga

SEQ ID NO: 3427 - RNA, 38 nt, Artificial Sequence
  Description of Artificial Sequence:  Enzymatic Nucleic Acid
  misc_feature (31)..(31): n stands for inosine
agggacgucugaugaggccguuaggccgaanuggccgc

SEQ ID NO: 3428 - RNA, 38 nt, Artificial Sequence
  Description of Artificial Sequence:  Enzymatic Nucleic Acid
  misc_feature (31)..(31): n stands for inosine
cagggacgcugaugaggccguuaggccgaanguggccg

SEQ ID NO: 3429 - RNA, 38 nt, Artificial Sequence
  Description of Artificial Sequence:  Enzymatic Nucleic Acid
  misc_feature (31)..(31): n stands for inosine
ugucccagcugaugaggccguuaggccgaanacguggu

SEQ ID NO: 3430 - RNA, 38 nt, Artificial Sequence
  Description of Artificial Sequence:  Enzymatic Nucleic Acid
  misc_feature (31)..(31): n stands for inosine
gugucccacugaugaggccguuaggccgaangacgugg

SEQ ID NO: 3431 - RNA, 38 nt, Artificial Sequence
  Description of Artificial Sequence:  Enzymatic Nucleic Acid
  misc_feature (31)..(31): n stands for inosine
cguguccccugaugaggccguuaggccgaanggacgug

SEQ ID NO: 3432 - RNA, 38 nt, Artificial Sequence
  Description of Artificial Sequence:  Enzymatic Nucleic Acid
  misc_feature (31)..(31): n stands for inosine
acaaggcgcugaugaggccguuaggccgaanucccagg

SEQ ID NO: 3433 - RNA, 38 nt, Artificial Sequence
  Description of Artificial Sequence:  Enzymatic Nucleic Acid
  misc_feature (31)..(31): n stands for inosine
ggggacaacugaugaggccguuaggccgaancgugucc

SEQ ID NO: 3434 - RNA, 38 nt, Artificial Sequence
  Description of Artificial Sequence:  Enzymatic Nucleic Acid
  misc_feature (31)..(31): n stands for inosine
gggggacacugaugaggccguuaggccgaangcguguc

SEQ ID NO: 3435 - RNA, 38 nt, Artificial Sequence
  Description of Artificial Sequence:  Enzymatic Nucleic Acid
  misc_feature (31)..(31): n stands for inosine
acaccgggcugaugaggccguuaggccgaanacaaggc

SEQ ID NO: 3436 - RNA, 38 nt, Artificial Sequence
  Description of Artificial Sequence:  Enzymatic Nucleic Acid
  misc_feature (31)..(31): n stands for inosine
uacaccggcugaugaggccguuaggccgaangacaagg

SEQ ID NO: 3437 - RNA, 38 nt, Artificial Sequence
  Description of Artificial Sequence:  Enzymatic Nucleic Acid
  misc_feature (31)..(31): n stands for inosine
guacaccgcugaugaggccguuaggccgaanggacaag

SEQ ID NO: 3438 - RNA, 38 nt, Artificial Sequence
  Description of Artificial Sequence:  Enzymatic Nucleic Acid
  misc_feature (31)..(31): n stands for inosine
cguacacccugaugaggccguuaggccgaangggacaa

SEQ ID NO: 3439 - RNA, 38 nt, Artificial Sequence
  Description of Artificial Sequence:  Enzymatic Nucleic Acid
  misc_feature (31)..(31): n stands for inosine
uuggucuccugaugaggccguuaggccgaancguacac

SEQ ID NO: 3440 - RNA, 38 nt, Artificial Sequence
  Description of Artificial Sequence:  Enzymatic Nucleic Acid
  misc_feature (31)..(31): n stands for inosine
aagugcuucugaugaggccguuaggccgaanucucggc

SEQ ID NO: 3441 - RNA, 38 nt, Artificial Sequence
  Description of Artificial Sequence:  Enzymatic Nucleic Acid
  misc_feature (31)..(31): n stands for inosine
gaagugcucugaugaggccguuaggccgaangucucgg

SEQ ID NO: 3442 - RNA, 38 nt, Artificial Sequence
  Description of Artificial Sequence:  Enzymatic Nucleic Acid
  misc_feature (31)..(31): n stands for inosine
agaggaagcugaugaggccguuaggccgaancuugguc

SEQ ID NO: 3443 - RNA, 38 nt, Artificial Sequence
  Description of Artificial Sequence:  Enzymatic Nucleic Acid
  misc_feature (31)..(31): n stands for inosine
guagaggacugaugaggccguuaggccgaanugcuugg

SEQ ID NO: 3444 - RNA, 38 nt, Artificial Sequence
  Description of Artificial Sequence:  Enzymatic Nucleic Acid
  misc_feature (31)..(31): n stands for inosine
ggaguagacugaugaggccguuaggccgaanaagugcu

SEQ ID NO: 3445 - RNA, 38 nt, Artificial Sequence
  Description of Artificial Sequence:  Enzymatic Nucleic Acid
  misc_feature (31)..(31): n stands for inosine
aggaguagcugaugaggccguuaggccgaangaagugc

SEQ ID NO: 3446 - RNA, 38 nt, Artificial Sequence
  Description of Artificial Sequence:  Enzymatic Nucleic Acid
  misc_feature (31)..(31): n stands for inosine
ugaggagucugaugaggccguuaggccgaanaggaagu

SEQ ID NO: 3447 - RNA, 38 nt, Artificial Sequence
  Description of Artificial Sequence:  Enzymatic Nucleic Acid
  misc_feature (31)..(31): n stands for inosine
gccugaggcugaugaggccguuaggccgaanuagagga

SEQ ID NO: 3448 - RNA, 38 nt, Artificial Sequence
  Description of Artificial Sequence:  Enzymatic Nucleic Acid
  misc_feature (31)..(31): n stands for inosine
ucgccugacugaugaggccguuaggccgaanaguagag

SEQ ID NO: 3449 - RNA, 38 nt, Artificial Sequence
  Description of Artificial Sequence:  Enzymatic Nucleic Acid
  misc_feature (31)..(31): n stands for inosine
gucgccugcugaugaggccguuaggccgaangaguaga

SEQ ID NO: 3450 - RNA, 38 nt, Artificial Sequence
  Description of Artificial Sequence:  Enzymatic Nucleic Acid
  misc_feature (31)..(31): n stands for inosine
uugucgcccugaugaggccguuaggccgaanaggagua

SEQ ID NO: 3451 - RNA, 38 nt, Artificial Sequence
  Description of Artificial Sequence:  Enzymatic Nucleic Acid
  misc_feature (31)..(31): n stands for inosine
cugcuccucugaugaggccguuaggccgaanucgccug

SEQ ID NO: 3452 - RNA, 38 nt, Artificial Sequence
  Description of Artificial Sequence:  Enzymatic Nucleic Acid
  misc_feature (31)..(31): n stands for inosine
gccgcagccugaugaggccguuaggccgaancuccuug

SEQ ID NO: 3453 - RNA, 38 nt, Artificial Sequence
  Description of Artificial Sequence:  Enzymatic Nucleic Acid
  misc_feature (31)..(31): n stands for inosine
agggccgccugaugaggccguuaggccgaancugcucc

SEQ ID NO: 3454 - RNA, 38 nt, Artificial Sequence
  Description of Artificial Sequence:  Enzymatic Nucleic Acid
  misc_feature (31)..(31): n stands for inosine
ggaaggagcugaugaggccguuaggccgaanccgcagc

SEQ ID NO: 3455 - RNA, 38 nt, Artificial Sequence
  Description of Artificial Sequence:  Enzymatic Nucleic Acid
  misc_feature (31)..(31): n stands for inosine
aggaaggacugaugaggccguuaggccgaangccgcag

SEQ ID NO: 3456 - RNA, 38 nt, Artificial Sequence
  Description of Artificial Sequence:  Enzymatic Nucleic Acid
  misc_feature (31)..(31): n stands for inosine
uaggaaggcugaugaggccguuaggccgaanggccgca

SEQ ID NO: 3457 - RNA, 38 nt, Artificial Sequence
  Description of Artificial Sequence:  Enzymatic Nucleic Acid
  misc_feature (31)..(31): n stands for inosine
aguaggaacugaugaggccguuaggccgaanagggccg

SEQ ID NO: 3458 - RNA, 38 nt, Artificial Sequence
  Description of Artificial Sequence:  Enzymatic Nucleic Acid
  misc_feature (31)..(31): n stands for inosine
gaguaggacugaugaggccguuaggccgaangagggcc

SEQ ID NO: 3459 - RNA, 38 nt, Artificial Sequence
  Description of Artificial Sequence:  Enzymatic Nucleic Acid
  misc_feature (31)..(31): n stands for inosine
gcugaguacugaugaggccguuaggccgaanaaggagg

SEQ ID NO: 3460 - RNA, 38 nt, Artificial Sequence
  Description of Artificial Sequence:  Enzymatic Nucleic Acid
  misc_feature (31)..(31): n stands for inosine
agcugagucugaugaggccguuaggccgaangaaggag

SEQ ID NO: 3461 - RNA, 38 nt, Artificial Sequence
  Description of Artificial Sequence:  Enzymatic Nucleic Acid
  misc_feature (31)..(31): n stands for inosine
gagagcugcugaugaggccguuaggccgaanuaggaag

SEQ ID NO: 3462 - RNA, 38 nt, Artificial Sequence
  Description of Artificial Sequence:  Enzymatic Nucleic Acid
  misc_feature (31)..(31): n stands for inosine
cagagagccugaugaggccguuaggccgaanaguagga

SEQ ID NO: 3463 - RNA, 38 nt, Artificial Sequence
  Description of Artificial Sequence:  Enzymatic Nucleic Acid
  misc_feature (31)..(31): n stands for inosine
ccucagagcugaugaggccguuaggccgaancugagua

SEQ ID NO: 3464 - RNA, 38 nt, Artificial Sequence
  Description of Artificial Sequence:  Enzymatic Nucleic Acid
  misc_feature (31)..(31): n stands for inosine
ggccucagcugaugaggccguuaggccgaanagcugag

SEQ ID NO: 3465 - RNA, 38 nt, Artificial Sequence
  Description of Artificial Sequence:  Enzymatic Nucleic Acid
  misc_feature (31)..(31): n stands for inosine
ugggccuccugaugaggccguuaggccgaanagagcug

SEQ ID NO: 3466 - RNA, 38 nt, Artificial Sequence
  Description of Artificial Sequence:  Enzymatic Nucleic Acid
  misc_feature (31)..(31): n stands for inosine
ucaggcugcugaugaggccguuaggccgaanccucaga

SEQ ID NO: 3467 - RNA, 38 nt, Artificial Sequence
  Description of Artificial Sequence:  Enzymatic Nucleic Acid
  misc_feature (31)..(31): n stands for inosine
gucaggcucugaugaggccguuaggccgaangccucag

SEQ ID NO: 3468 - RNA, 38 nt, Artificial Sequence
  Description of Artificial Sequence:  Enzymatic Nucleic Acid
  misc_feature (31)..(31): n stands for inosine
agucaggccugaugaggccguuaggccgaanggccuca

SEQ ID NO: 3469 - RNA, 38 nt, Artificial Sequence
  Description of Artificial Sequence:  Enzymatic Nucleic Acid
  misc_feature (31)..(31): n stands for inosine
gccagucacugaugaggccguuaggccgaancugggcc

SEQ ID NO: 3470 - RNA, 38 nt, Artificial Sequence
  Description of Artificial Sequence:  Enzymatic Nucleic Acid
  misc_feature (31)..(31): n stands for inosine
cgccaguccugaugaggccguuaggccgaangcugggc

SEQ ID NO: 3471 - RNA, 38 nt, Artificial Sequence
  Description of Artificial Sequence:  Enzymatic Nucleic Acid
  misc_feature (31)..(31): n stands for inosine
cgagcgcccugaugaggccguuaggccgaanucaggcu

SEQ ID NO: 3472 - RNA, 38 nt, Artificial Sequence
  Description of Artificial Sequence:  Enzymatic Nucleic Acid
  misc_feature (31)..(31): n stands for inosine
agccuccgcugaugaggccguuaggccgaancgccagu

SEQ ID NO: 3473 - RNA, 38 nt, Artificial Sequence
  Description of Artificial Sequence:  Enzymatic Nucleic Acid
  misc_feature (31)..(31): n stands for inosine
ucuccacgcugaugaggccguuaggccgaanccuccga

SEQ ID NO: 3474 - RNA, 38 nt, Artificial Sequence
  Description of Artificial Sequence:  Enzymatic Nucleic Acid
  misc_feature (31)..(31): n stands for inosine
agaaagaucugaugaggccguuaggccgaanucuccac

SEQ ID NO: 3475 - RNA, 38 nt, Artificial Sequence
  Description of Artificial Sequence:  Enzymatic Nucleic Acid
  misc_feature (31)..(31): n stands for inosine
cagaaagacugaugaggccguuaggccgaangucucca

SEQ ID NO: 3476 - RNA, 38 nt, Artificial Sequence
  Description of Artificial Sequence:  Enzymatic Nucleic Acid
  misc_feature (31)..(31): n stands for inosine
acccagaacugaugaggccguuaggccgaanauggucu

SEQ ID NO: 3477 - RNA, 38 nt, Artificial Sequence
  Description of Artificial Sequence:  Enzymatic Nucleic Acid
  misc_feature (31)..(31): n stands for inosine
uggaaccccugaugaggccguuaggccgaanaaagaug

SEQ ID NO: 3478 - RNA, 38 nt, Artificial Sequence
  Description of Artificial Sequence:  Enzymatic Nucleic Acid
  misc_feature (31)..(31): n stands for inosine
cagggccucugaugaggccguuaggccgaanaacccag

SEQ ID NO: 3479 - RNA, 38 nt, Artificial Sequence
  Description of Artificial Sequence:  Enzymatic Nucleic Acid
  misc_feature (31)..(31): n stands for inosine
ccagggcccugaugaggccguuaggccgaangaaccca

SEQ ID NO: 3480 - RNA, 38 nt, Artificial Sequence
  Description of Artificial Sequence:  Enzymatic Nucleic Acid
  misc_feature (31)..(31): n stands for inosine
gcauccagcugaugaggccguuaggccgaanccuggaa

SEQ ID NO: 3481 - RNA, 38 nt, Artificial Sequence
  Description of Artificial Sequence:  Enzymatic Nucleic Acid
  misc_feature (31)..(31): n stands for inosine
ggcauccacugaugaggccguuaggccgaangccugga

SEQ ID NO: 3482 - RNA, 38 nt, Artificial Sequence
  Description of Artificial Sequence:  Enzymatic Nucleic Acid
  misc_feature (31)..(31): n stands for inosine
uggcaucccugaugaggccguuaggccgaanggccugg

SEQ ID NO: 3483 - RNA, 38 nt, Artificial Sequence
  Description of Artificial Sequence:  Enzymatic Nucleic Acid
  misc_feature (31)..(31): n stands for inosine
gagucccucugaugaggccguuaggccgaancauccag

SEQ ID NO: 3484 - RNA, 38 nt, Artificial Sequence
  Description of Artificial Sequence:  Enzymatic Nucleic Acid
  misc_feature (31)..(31): n stands for inosine
ggaguccccugaugaggccguuaggccgaangcaucca

SEQ ID NO: 3485 - RNA, 38 nt, Artificial Sequence
  Description of Artificial Sequence:  Enzymatic Nucleic Acid
  misc_feature (31)..(31): n stands for inosine
cugcggggcugaugaggccguuaggccgaanucccugg

SEQ ID NO: 3486 - RNA, 38 nt, Artificial Sequence
  Description of Artificial Sequence:  Enzymatic Nucleic Acid
  misc_feature (31)..(31): n stands for inosine
accugcggcugaugaggccguuaggccgaanagucccu

SEQ ID NO: 3487 - RNA, 38 nt, Artificial Sequence
  Description of Artificial Sequence:  Enzymatic Nucleic Acid
  misc_feature (31)..(31): n stands for inosine
aaccugcgcugaugaggccguuaggccgaangaguccc

SEQ ID NO: 3488 - RNA, 38 nt, Artificial Sequence
  Description of Artificial Sequence:  Enzymatic Nucleic Acid
  misc_feature (31)..(31): n stands for inosine
caaccugccugaugaggccguuaggccgaanggagucc

SEQ ID NO: 3489 - RNA, 38 nt, Artificial Sequence
  Description of Artificial Sequence:  Enzymatic Nucleic Acid
  misc_feature (31)..(31): n stands for inosine
gggcaacccugaugaggccguuaggccgaancggggag

SEQ ID NO: 3490 - RNA, 38 nt, Artificial Sequence
  Description of Artificial Sequence:  Enzymatic Nucleic Acid
  misc_feature (31)..(31): n stands for inosine
gcaggcggcugaugaggccguuaggccgaancaaccug

SEQ ID NO: 3491 - RNA, 38 nt, Artificial Sequence
  Description of Artificial Sequence:  Enzymatic Nucleic Acid
  misc_feature (31)..(31): n stands for inosine
ggcaggcgcugaugaggccguuaggccgaangcaaccu

SEQ ID NO: 3492 - RNA, 38 nt, Artificial Sequence
  Description of Artificial Sequence:  Enzymatic Nucleic Acid
  misc_feature (31)..(31): n stands for inosine
gggcaggccugaugaggccguuaggccgaanggcaacc

SEQ ID NO: 3493 - RNA, 38 nt, Artificial Sequence
  Description of Artificial Sequence:  Enzymatic Nucleic Acid
  misc_feature (31)..(31): n stands for inosine
cuggggcacugaugaggccguuaggccgaancggggca

SEQ ID NO: 3494 - RNA, 38 nt, Artificial Sequence
  Description of Artificial Sequence:  Enzymatic Nucleic Acid
  misc_feature (31)..(31): n stands for inosine
gcuggggccugaugaggccguuaggccgaangcggggc

SEQ ID NO: 3495 - RNA, 38 nt, Artificial Sequence
  Description of Artificial Sequence:  Enzymatic Nucleic Acid
  misc_feature (31)..(31): n stands for inosine
agcgcuggcugaugaggccguuaggccgaancaggcgg

SEQ ID NO: 3496 - RNA, 38 nt, Artificial Sequence
  Description of Artificial Sequence:  Enzymatic Nucleic Acid
  misc_feature (31)..(31): n stands for inosine
uagcgcugcugaugaggccguuaggccgaangcaggcg

SEQ ID NO: 3497 - RNA, 38 nt, Artificial Sequence
  Description of Artificial Sequence:  Enzymatic Nucleic Acid
  misc_feature (31)..(31): n stands for inosine
guagcgcucugaugaggccguuaggccgaanggcaggc

SEQ ID NO: 3498 - RNA, 38 nt, Artificial Sequence
  Description of Artificial Sequence:  Enzymatic Nucleic Acid
  misc_feature (31)..(31): n stands for inosine
aguagcgccugaugaggccguuaggccgaangggcagg

SEQ ID NO: 3499 - RNA, 38 nt, Artificial Sequence
  Description of Artificial Sequence:  Enzymatic Nucleic Acid
  misc_feature (31)..(31): n stands for inosine
uugccagucugaugaggccguuaggccgaancgcuggg

SEQ ID NO: 3500 - RNA, 38 nt, Artificial Sequence
  Description of Artificial Sequence:  Enzymatic Nucleic Acid
  misc_feature (31)..(31): n stands for inosine
cauuugcccugaugaggccguuaggccgaanuagcgcu

SEQ ID NO: 3501 - RNA, 38 nt, Artificial Sequence
  Description of Artificial Sequence:  Enzymatic Nucleic Acid
  misc_feature (31)..(31): n stands for inosine
gccgcauucugaugaggccguuaggccgaanccaguag

SEQ ID NO: 3502 - RNA, 38 nt, Artificial Sequence
  Description of Artificial Sequence:  Enzymatic Nucleic Acid
  misc_feature (31)..(31): n stands for inosine
gaaacaggcugaugaggccguuaggccgaanccgcauu

SEQ ID NO: 3503 - RNA, 38 nt, Artificial Sequence
  Description of Artificial Sequence:  Enzymatic Nucleic Acid
  misc_feature (31)..(31): n stands for inosine
agaaacagcugaugaggccguuaggccgaangccgcau

SEQ ID NO: 3504 - RNA, 38 nt, Artificial Sequence
  Description of Artificial Sequence:  Enzymatic Nucleic Acid
  misc_feature (31)..(31): n stands for inosine
cagaaacacugaugaggccguuaggccgaanggccgca

SEQ ID NO: 3505 - RNA, 38 nt, Artificial Sequence
  Description of Artificial Sequence:  Enzymatic Nucleic Acid
  misc_feature (31)..(31): n stands for inosine
ccagaaaccugaugaggccguuaggccgaangggccgc

SEQ ID NO: 3506 - RNA, 38 nt, Artificial Sequence
  Description of Artificial Sequence:  Enzymatic Nucleic Acid
  misc_feature (31)..(31): n stands for inosine
gcagcucccugaugaggccguuaggccgaanaaacagg

SEQ ID NO: 3507 - RNA, 38 nt, Artificial Sequence
  Description of Artificial Sequence:  Enzymatic Nucleic Acid
  misc_feature (31)..(31): n stands for inosine
ucccaagccugaugaggccguuaggccgaancuccaga

SEQ ID NO: 3508 - RNA, 38 nt, Artificial Sequence
  Description of Artificial Sequence:  Enzymatic Nucleic Acid
  misc_feature (31)..(31): n stands for inosine
gguucccacugaugaggccguuaggccgaancagcucc

SEQ ID NO: 3509 - RNA, 38 nt, Artificial Sequence
  Description of Artificial Sequence:  Enzymatic Nucleic Acid
  misc_feature (31)..(31): n stands for inosine
cugcgcgucugaugaggccguuaggccgaanuucccaa

SEQ ID NO: 3510 - RNA, 38 nt, Artificial Sequence
  Description of Artificial Sequence:  Enzymatic Nucleic Acid
  misc_feature (31)..(31): n stands for inosine
acugcgcgcugaugaggccguuaggccgaanguuccca

SEQ ID NO: 3511 - RNA, 38 nt, Artificial Sequence
  Description of Artificial Sequence:  Enzymatic Nucleic Acid
  misc_feature (31)..(31): n stands for inosine
aggggcaccugaugaggccguuaggccgaancgcgugg

SEQ ID NO: 3512 - RNA, 38 nt, Artificial Sequence
  Description of Artificial Sequence:  Enzymatic Nucleic Acid
  misc_feature (31)..(31): n stands for inosine
cccguaggcugaugaggccguuaggccgaancacugcg

SEQ ID NO: 3513 - RNA, 38 nt, Artificial Sequence
  Description of Artificial Sequence:  Enzymatic Nucleic Acid
  misc_feature (31)..(31): n stands for inosine
ccccguagcugaugaggccguuaggccgaangcacugc

SEQ ID NO: 3514 - RNA, 38 nt, Artificial Sequence
  Description of Artificial Sequence:  Enzymatic Nucleic Acid
  misc_feature (31)..(31): n stands for inosine
accccguacugaugaggccguuaggccgaanggcacug

SEQ ID NO: 3515 - RNA, 38 nt, Artificial Sequence
  Description of Artificial Sequence:  Enzymatic Nucleic Acid
  misc_feature (31)..(31): n stands for inosine
caccccgucugaugaggccguuaggccgaangggcacu

SEQ ID NO: 3516 - RNA, 38 nt, Artificial Sequence
  Description of Artificial Sequence:  Enzymatic Nucleic Acid
  misc_feature (31)..(31): n stands for inosine
ucuugaggcugaugaggccguuaggccgaancaccccg

SEQ ID NO: 3517 - RNA, 38 nt, Artificial Sequence
  Description of Artificial Sequence:  Enzymatic Nucleic Acid
  misc_feature (31)..(31): n stands for inosine
cgucuugacugaugaggccguuaggccgaanagcaccc

SEQ ID NO: 3518 - RNA, 38 nt, Artificial Sequence
  Description of Artificial Sequence:  Enzymatic Nucleic Acid
  misc_feature (31)..(31): n stands for inosine
gcgucuugcugaugaggccguuaggccgaangagcacc

SEQ ID NO: 3519 - RNA, 38 nt, Artificial Sequence
  Description of Artificial Sequence:  Enzymatic Nucleic Acid
  misc_feature (31)..(31): n stands for inosine
gugcgucucugaugaggccguuaggccgaanaggagca

SEQ ID NO: 3520 - RNA, 38 nt, Artificial Sequence
  Description of Artificial Sequence:  Enzymatic Nucleic Acid
  misc_feature (31)..(31): n stands for inosine
gcgggcagcugaugaggccguuaggccgaancgucuug

SEQ ID NO: 3521 - RNA, 38 nt, Artificial Sequence
  Description of Artificial Sequence:  Enzymatic Nucleic Acid
  misc_feature (31)..(31): n stands for inosine
cagcgggccugaugaggccguuaggccgaanugcgucu

SEQ ID NO: 3522 - RNA, 38 nt, Artificial Sequence
  Description of Artificial Sequence:  Enzymatic Nucleic Acid
  misc_feature (31)..(31): n stands for inosine
ucgcagcgcugaugaggccguuaggccgaancagugcg

SEQ ID NO: 3523 - RNA, 38 nt, Artificial Sequence
  Description of Artificial Sequence:  Enzymatic Nucleic Acid
  misc_feature (31)..(31): n stands for inosine
cucgcagccugaugaggccguuaggccgaangcagugc

SEQ ID NO: 3524 - RNA, 38 nt, Artificial Sequence
  Description of Artificial Sequence:  Enzymatic Nucleic Acid
  misc_feature (31)..(31): n stands for inosine
cagcucgccugaugaggccguuaggccgaancgggcag

SEQ ID NO: 3525 - RNA, 38 nt, Artificial Sequence
  Description of Artificial Sequence:  Enzymatic Nucleic Acid
  misc_feature (31)..(31): n stands for inosine
gugaccgccugaugaggccguuaggccgaancucgcag

SEQ ID NO: 3526 - RNA, 38 nt, Artificial Sequence
  Description of Artificial Sequence:  Enzymatic Nucleic Acid
  misc_feature (31)..(31): n stands for inosine
ugcuggggcugaugaggccguuaggccgaanaccgcag

SEQ ID NO: 3527 - RNA, 38 nt, Artificial Sequence
  Description of Artificial Sequence:  Enzymatic Nucleic Acid
  misc_feature (31)..(31): n stands for inosine
gcugcuggcugaugaggccguuaggccgaanugaccgc

SEQ ID NO: 3528 - RNA, 38 nt, Artificial Sequence
  Description of Artificial Sequence:  Enzymatic Nucleic Acid
  misc_feature (31)..(31): n stands for inosine
ggcugcugcugaugaggccguuaggccgaangugaccg

SEQ ID NO: 3529 - RNA, 38 nt, Artificial Sequence
  Description of Artificial Sequence:  Enzymatic Nucleic Acid
  misc_feature (31)..(31): n stands for inosine
cggcugcucugaugaggccguuaggccgaanggugacc

SEQ ID NO: 3530 - RNA, 38 nt, Artificial Sequence
  Description of Artificial Sequence:  Enzymatic Nucleic Acid
  misc_feature (31)..(31): n stands for inosine
ccggcugccugaugaggccguuaggccgaangggugac

SEQ ID NO: 3531 - RNA, 38 nt, Artificial Sequence
  Description of Artificial Sequence:  Enzymatic Nucleic Acid
  misc_feature (31)..(31): n stands for inosine
acaccggccugaugaggccguuaggccgaancuggggu

SEQ ID NO: 3532 - RNA, 38 nt, Artificial Sequence
  Description of Artificial Sequence:  Enzymatic Nucleic Acid
  misc_feature (31)..(31): n stands for inosine
cagacacccugaugaggccguuaggccgaancugcugg

SEQ ID NO: 3533 - RNA, 38 nt, Artificial Sequence
  Description of Artificial Sequence:  Enzymatic Nucleic Acid
  misc_feature (31)..(31): n stands for inosine
ccgggcaccugaugaggccguuaggccgaanacaccgg

SEQ ID NO: 3534 - RNA, 38 nt, Artificial Sequence
  Description of Artificial Sequence:  Enzymatic Nucleic Acid
  misc_feature (31)..(31): n stands for inosine
uucucccgcugaugaggccguuaggccgaancacagac

SEQ ID NO: 3535 - RNA, 38 nt, Artificial Sequence
  Description of Artificial Sequence:  Enzymatic Nucleic Acid
  misc_feature (31)..(31): n stands for inosine
cuucuccccugaugaggccguuaggccgaangcacaga

SEQ ID NO: 3536 - RNA, 38 nt, Artificial Sequence
  Description of Artificial Sequence:  Enzymatic Nucleic Acid
  misc_feature (31)..(31): n stands for inosine
agcccuggcugaugaggccguuaggccgaancuucucc

SEQ ID NO: 3537 - RNA, 38 nt, Artificial Sequence
  Description of Artificial Sequence:  Enzymatic Nucleic Acid
  misc_feature (31)..(31): n stands for inosine
gagcccugcugaugaggccguuaggccgaangcuucuc

SEQ ID NO: 3538 - RNA, 38 nt, Artificial Sequence
  Description of Artificial Sequence:  Enzymatic Nucleic Acid
  misc_feature (31)..(31): n stands for inosine
agagcccucugaugaggccguuaggccgaanggcuucu

SEQ ID NO: 3539 - RNA, 38 nt, Artificial Sequence
  Description of Artificial Sequence:  Enzymatic Nucleic Acid
  misc_feature (31)..(31): n stands for inosine
cagagccccugaugaggccguuaggccgaangggcuuc

SEQ ID NO: 3540 - RNA, 38 nt, Artificial Sequence
  Description of Artificial Sequence:  Enzymatic Nucleic Acid
  misc_feature (31)..(31): n stands for inosine
cgccacagcugaugaggccguuaggccgaancccuggg

SEQ ID NO: 3541 - RNA, 38 nt, Artificial Sequence
  Description of Artificial Sequence:  Enzymatic Nucleic Acid
  misc_feature (31)..(31): n stands for inosine
gccgccaccugaugaggccguuaggccgaanagcccug

SEQ ID NO: 3542 - RNA, 38 nt, Artificial Sequence
  Description of Artificial Sequence:  Enzymatic Nucleic Acid
  misc_feature (31)..(31): n stands for inosine
uccucgggcugaugaggccguuaggccgaanccgccac

SEQ ID NO: 3543 - RNA, 38 nt, Artificial Sequence
  Description of Artificial Sequence:  Enzymatic Nucleic Acid
  misc_feature (31)..(31): n stands for inosine
cuccucggcugaugaggccguuaggccgaangccgcca

SEQ ID NO: 3544 - RNA, 38 nt, Artificial Sequence
  Description of Artificial Sequence:  Enzymatic Nucleic Acid
  misc_feature (31)..(31): n stands for inosine
ccuccucgcugaugaggccguuaggccgaanggccgcc

SEQ ID NO: 3545 - RNA, 38 nt, Artificial Sequence
  Description of Artificial Sequence:  Enzymatic Nucleic Acid
  misc_feature (31)..(31): n stands for inosine
uccuccuccugaugaggccguuaggccgaangggccgc

SEQ ID NO: 3546 - RNA, 38 nt, Artificial Sequence
  Description of Artificial Sequence:  Enzymatic Nucleic Acid
  misc_feature (31)..(31): n stands for inosine
ggggucugcugaugaggccguuaggccgaanuccuccu

SEQ ID NO: 3547 - RNA, 38 nt, Artificial Sequence
  Description of Artificial Sequence:  Enzymatic Nucleic Acid
  misc_feature (31)..(31): n stands for inosine
cggggguccugaugaggccguuaggccgaanuguccuc

SEQ ID NO: 3548 - RNA, 38 nt, Artificial Sequence
  Description of Artificial Sequence:  Enzymatic Nucleic Acid
  misc_feature (31)..(31): n stands for inosine
gcgacgggcugaugaggccguuaggccgaanucugugu

SEQ ID NO: 3549 - RNA, 38 nt, Artificial Sequence
  Description of Artificial Sequence:  Enzymatic Nucleic Acid
  misc_feature (31)..(31): n stands for inosine
ggcgacggcugaugaggccguuaggccgaangucugug

SEQ ID NO: 3550 - RNA, 38 nt, Artificial Sequence
  Description of Artificial Sequence:  Enzymatic Nucleic Acid
  misc_feature (31)..(31): n stands for inosine
aggcgacgcugaugaggccguuaggccgaanggucugu

SEQ ID NO: 3551 - RNA, 38 nt, Artificial Sequence
  Description of Artificial Sequence:  Enzymatic Nucleic Acid
  misc_feature (31)..(31): n stands for inosine
caggcgaccugaugaggccguuaggccgaangggucug

SEQ ID NO: 3552 - RNA, 38 nt, Artificial Sequence
  Description of Artificial Sequence:  Enzymatic Nucleic Acid
  misc_feature (31)..(31): n stands for inosine
cugcaccacugaugaggccguuaggccgaancgacggg

SEQ ID NO: 3553 - RNA, 38 nt, Artificial Sequence
  Description of Artificial Sequence:  Enzymatic Nucleic Acid
  misc_feature (31)..(31): n stands for inosine
gcugcacccugaugaggccguuaggccgaangcgacgg

SEQ ID NO: 3554 - RNA, 38 nt, Artificial Sequence
  Description of Artificial Sequence:  Enzymatic Nucleic Acid
  misc_feature (31)..(31): n stands for inosine
ggagcagccugaugaggccguuaggccgaancaccagg

SEQ ID NO: 3555 - RNA, 38 nt, Artificial Sequence
  Description of Artificial Sequence:  Enzymatic Nucleic Acid
  misc_feature (31)..(31): n stands for inosine
ggcggagccugaugaggccguuaggccgaancugcacc

SEQ ID NO: 3556 - RNA, 38 nt, Artificial Sequence
  Description of Artificial Sequence:  Enzymatic Nucleic Acid
  misc_feature (31)..(31): n stands for inosine
gcuggcggcugaugaggccguuaggccgaancagcugc

SEQ ID NO: 3557 - RNA, 38 nt, Artificial Sequence
  Description of Artificial Sequence:  Enzymatic Nucleic Acid
  misc_feature (31)..(31): n stands for inosine
gugcuggccugaugaggccguuaggccgaanagcagcu

SEQ ID NO: 3558 - RNA, 38 nt, Artificial Sequence
  Description of Artificial Sequence:  Enzymatic Nucleic Acid
  misc_feature (31)..(31): n stands for inosine
gcugugcucugaugaggccguuaggccgaancggagca

SEQ ID NO: 3559 - RNA, 38 nt, Artificial Sequence
  Description of Artificial Sequence:  Enzymatic Nucleic Acid
  misc_feature (31)..(31): n stands for inosine
ugcugugccugaugaggccguuaggccgaangcggagc

SEQ ID NO: 3560 - RNA, 38 nt, Artificial Sequence
  Description of Artificial Sequence:  Enzymatic Nucleic Acid
  misc_feature (31)..(31): n stands for inosine
ggcugcugcugaugaggccguuaggccgaancuggcgg

SEQ ID NO: 3561 - RNA, 38 nt, Artificial Sequence
  Description of Artificial Sequence:  Enzymatic Nucleic Acid
  misc_feature (31)..(31): n stands for inosine
ggggcugccugaugaggccguuaggccgaanugcuggc

SEQ ID NO: 3562 - RNA, 38 nt, Artificial Sequence
  Description of Artificial Sequence:  Enzymatic Nucleic Acid
  misc_feature (31)..(31): n stands for inosine
ccaggggccugaugaggccguuaggccgaancugugcu

SEQ ID NO: 3563 - RNA, 38 nt, Artificial Sequence
  Description of Artificial Sequence:  Enzymatic Nucleic Acid
  misc_feature (31)..(31): n stands for inosine
cugccaggcugaugaggccguuaggccgaancugcugu

SEQ ID NO: 3564 - RNA, 38 nt, Artificial Sequence
  Description of Artificial Sequence:  Enzymatic Nucleic Acid
  misc_feature (31)..(31): n stands for inosine
ccugccagcugaugaggccguuaggccgaangcugcug

SEQ ID NO: 3565 - RNA, 38 nt, Artificial Sequence
  Description of Artificial Sequence:  Enzymatic Nucleic Acid
  misc_feature (31)..(31): n stands for inosine
accugccacugaugaggccguuaggccgaanggcugcu

SEQ ID NO: 3566 - RNA, 38 nt, Artificial Sequence
  Description of Artificial Sequence:  Enzymatic Nucleic Acid
  misc_feature (31)..(31): n stands for inosine
caccugcccugaugaggccguuaggccgaangggcugc

SEQ ID NO: 3567 - RNA, 38 nt, Artificial Sequence
  Description of Artificial Sequence:  Enzymatic Nucleic Acid
  misc_feature (31)..(31): n stands for inosine
cguacacccugaugaggccguuaggccgaanccagggg

SEQ ID NO: 3568 - RNA, 38 nt, Artificial Sequence
  Description of Artificial Sequence:  Enzymatic Nucleic Acid
  misc_feature (31)..(31): n stands for inosine
ccgcacgacugaugaggccguuaggccgaanccguaca

SEQ ID NO: 3569 - RNA, 38 nt, Artificial Sequence
  Description of Artificial Sequence:  Enzymatic Nucleic Acid
  misc_feature (31)..(31): n stands for inosine
cgcaggcacugaugaggccguuaggccgaancccgcac

SEQ ID NO: 3570 - RNA, 38 nt, Artificial Sequence
  Description of Artificial Sequence:  Enzymatic Nucleic Acid
  misc_feature (31)..(31): n stands for inosine
gcgcaggccugaugaggccguuaggccgaangcccgca

SEQ ID NO: 3571 - RNA, 38 nt, Artificial Sequence
  Description of Artificial Sequence:  Enzymatic Nucleic Acid
  misc_feature (31)..(31): n stands for inosine
ccggcgcacugaugaggccguuaggccgaancaggccc

SEQ ID NO: 3572 - RNA, 38 nt, Artificial Sequence
  Description of Artificial Sequence:  Enzymatic Nucleic Acid
  misc_feature (31)..(31): n stands for inosine
gccggcgccugaugaggccguuaggccgaangcaggcc

SEQ ID NO: 3573 - RNA, 38 nt, Artificial Sequence
  Description of Artificial Sequence:  Enzymatic Nucleic Acid
  misc_feature (31)..(31): n stands for inosine
caccagcccugaugaggccguuaggccgaancgcaggc

SEQ ID NO: 3574 - RNA, 38 nt, Artificial Sequence
  Description of Artificial Sequence:  Enzymatic Nucleic Acid
  misc_feature (31)..(31): n stands for inosine
ggggcacccugaugaggccguuaggccgaanccggcgc

SEQ ID NO: 3575 - RNA, 38 nt, Artificial Sequence
  Description of Artificial Sequence:  Enzymatic Nucleic Acid
  misc_feature (31)..(31): n stands for inosine
ggccugggcugaugaggccguuaggccgaancaccagc

SEQ ID NO: 3576 - RNA, 38 nt, Artificial Sequence
  Description of Artificial Sequence:  Enzymatic Nucleic Acid
  misc_feature (31)..(31): n stands for inosine
aggccuggcugaugaggccguuaggccgaangcaccag

SEQ ID NO: 3577 - RNA, 38 nt, Artificial Sequence
  Description of Artificial Sequence:  Enzymatic Nucleic Acid
  misc_feature (31)..(31): n stands for inosine
gaggccugcugaugaggccguuaggccgaanggcacca

SEQ ID NO: 3578 - RNA, 38 nt, Artificial Sequence
  Description of Artificial Sequence:  Enzymatic Nucleic Acid
  misc_feature (31)..(31): n stands for inosine
agaggccucugaugaggccguuaggccgaangggcacc

SEQ ID NO: 3579 - RNA, 38 nt, Artificial Sequence
  Description of Artificial Sequence:  Enzymatic Nucleic Acid
  misc_feature (31)..(31): n stands for inosine
cagaggcccugaugaggccguuaggccgaanggggcac

SEQ ID NO: 3580 - RNA, 38 nt, Artificial Sequence
  Description of Artificial Sequence:  Enzymatic Nucleic Acid
  misc_feature (31)..(31): n stands for inosine
gccccagacugaugaggccguuaggccgaanccugggg

SEQ ID NO: 3581 - RNA, 38 nt, Artificial Sequence
  Description of Artificial Sequence:  Enzymatic Nucleic Acid
  misc_feature (31)..(31): n stands for inosine
agccccagcugaugaggccguuaggccgaangccuggg

SEQ ID NO: 3582 - RNA, 38 nt, Artificial Sequence
  Description of Artificial Sequence:  Enzymatic Nucleic Acid
  misc_feature (31)..(31): n stands for inosine
ggagcccccugaugaggccguuaggccgaanaggccug

SEQ ID NO: 3583 - RNA, 38 nt, Artificial Sequence
  Description of Artificial Sequence:  Enzymatic Nucleic Acid
  misc_feature (31)..(31): n stands for inosine
gugccuggcugaugaggccguuaggccgaanccccaga

SEQ ID NO: 3584 - RNA, 38 nt, Artificial Sequence
  Description of Artificial Sequence:  Enzymatic Nucleic Acid
  misc_feature (31)..(31): n stands for inosine
uugugccucugaugaggccguuaggccgaanagcccca

SEQ ID NO: 3585 - RNA, 38 nt, Artificial Sequence
  Description of Artificial Sequence:  Enzymatic Nucleic Acid
  misc_feature (31)..(31): n stands for inosine
guugugcccugaugaggccguuaggccgaangagcccc

SEQ ID NO: 3586 - RNA, 38 nt, Artificial Sequence
  Description of Artificial Sequence:  Enzymatic Nucleic Acid
  misc_feature (31)..(31): n stands for inosine
guucguugcugaugaggccguuaggccgaanccuggag

SEQ ID NO: 3587 - RNA, 38 nt, Artificial Sequence
  Description of Artificial Sequence:  Enzymatic Nucleic Acid
  misc_feature (31)..(31): n stands for inosine
gcguucgucugaugaggccguuaggccgaanugccugg

SEQ ID NO: 3588 - RNA, 38 nt, Artificial Sequence
  Description of Artificial Sequence:  Enzymatic Nucleic Acid
  misc_feature (31)..(31): n stands for inosine
gaggaagccugaugaggccguuaggccgaancguucgu

SEQ ID NO: 3589 - RNA, 38 nt, Artificial Sequence
  Description of Artificial Sequence:  Enzymatic Nucleic Acid
  misc_feature (31)..(31): n stands for inosine
ccugaggacugaugaggccguuaggccgaancggcguu

SEQ ID NO: 3590 - RNA, 38 nt, Artificial Sequence
  Description of Artificial Sequence:  Enzymatic Nucleic Acid
  misc_feature (31)..(31): n stands for inosine
guuccugacugaugaggccguuaggccgaanaagcggc

SEQ ID NO: 3591 - RNA, 38 nt, Artificial Sequence
  Description of Artificial Sequence:  Enzymatic Nucleic Acid
  misc_feature (31)..(31): n stands for inosine
uguuccugcugaugaggccguuaggccgaangaagcgg

SEQ ID NO: 3592 - RNA, 38 nt, Artificial Sequence
  Description of Artificial Sequence:  Enzymatic Nucleic Acid
  misc_feature (31)..(31): n stands for inosine
gguguucccugaugaggccguuaggccgaanaggaagc

SEQ ID NO: 3593 - RNA, 38 nt, Artificial Sequence
  Description of Artificial Sequence:  Enzymatic Nucleic Acid
  misc_feature (31)..(31): n stands for inosine
cuucuuggcugaugaggccguuaggccgaanuuccuga

SEQ ID NO: 3594 - RNA, 38 nt, Artificial Sequence
  Description of Artificial Sequence:  Enzymatic Nucleic Acid
  misc_feature (31)..(31): n stands for inosine
aacuucuucugaugaggccguuaggccgaanuguuccu

SEQ ID NO: 3595 - RNA, 38 nt, Artificial Sequence
  Description of Artificial Sequence:  Enzymatic Nucleic Acid
  misc_feature (31)..(31): n stands for inosine
gaacuucucugaugaggccguuaggccgaanguguucc

SEQ ID NO: 3596 - RNA, 38 nt, Artificial Sequence
  Description of Artificial Sequence:  Enzymatic Nucleic Acid
  misc_feature (31)..(31): n stands for inosine
cagggagacugaugaggccguuaggccgaanaacuucu

SEQ ID NO: 3597 - RNA, 38 nt, Artificial Sequence
  Description of Artificial Sequence:  Enzymatic Nucleic Acid
  misc_feature (31)..(31): n stands for inosine
ccccagggcugaugaggccguuaggccgaanaugaacu

SEQ ID NO: 3598 - RNA, 38 nt, Artificial Sequence
  Description of Artificial Sequence:  Enzymatic Nucleic Acid
  misc_feature (31)..(31): n stands for inosine
uuccccagcugaugaggccguuaggccgaanagaugaa

SEQ ID NO: 3599 - RNA, 38 nt, Artificial Sequence
  Description of Artificial Sequence:  Enzymatic Nucleic Acid
  misc_feature (31)..(31): n stands for inosine
cuuccccacugaugaggccguuaggccgaangagauga

SEQ ID NO: 3600 - RNA, 38 nt, Artificial Sequence
  Description of Artificial Sequence:  Enzymatic Nucleic Acid
  misc_feature (31)..(31): n stands for inosine
gcuucccccugaugaggccguuaggccgaanggagaug

SEQ ID NO: 3601 - RNA, 38 nt, Artificial Sequence
  Description of Artificial Sequence:  Enzymatic Nucleic Acid
  misc_feature (31)..(31): n stands for inosine
gcuuggcacugaugaggccguuaggccgaancuucccc

SEQ ID NO: 3602 - RNA, 38 nt, Artificial Sequence
  Description of Artificial Sequence:  Enzymatic Nucleic Acid
  misc_feature (31)..(31): n stands for inosine
gagagcuucugaugaggccguuaggccgaancaugcuu

SEQ ID NO: 3603 - RNA, 38 nt, Artificial Sequence
  Description of Artificial Sequence:  Enzymatic Nucleic Acid
  misc_feature (31)..(31): n stands for inosine
cgagagcucugaugaggccguuaggccgaangcaugcu

SEQ ID NO: 3604 - RNA, 38 nt, Artificial Sequence
  Description of Artificial Sequence:  Enzymatic Nucleic Acid
  misc_feature (31)..(31): n stands for inosine
gcagcgagcugaugaggccguuaggccgaancuuggca

SEQ ID NO: 3605 - RNA, 38 nt, Artificial Sequence
  Description of Artificial Sequence:  Enzymatic Nucleic Acid
  misc_feature (31)..(31): n stands for inosine
cugcagcgcugaugaggccguuaggccgaanagcuugg

SEQ ID NO: 3606 - RNA, 38 nt, Artificial Sequence
  Description of Artificial Sequence:  Enzymatic Nucleic Acid
  misc_feature (31)..(31): n stands for inosine
gcuccugccugaugaggccguuaggccgaancgagagc

SEQ ID NO: 3607 - RNA, 38 nt, Artificial Sequence
  Description of Artificial Sequence:  Enzymatic Nucleic Acid
  misc_feature (31)..(31): n stands for inosine
ucagcucccugaugaggccguuaggccgaancagcgag

SEQ ID NO: 3608 - RNA, 38 nt, Artificial Sequence
  Description of Artificial Sequence:  Enzymatic Nucleic Acid
  misc_feature (31)..(31): n stands for inosine
uccacguccugaugaggccguuaggccgaancuccugc

SEQ ID NO: 3609 - RNA, 38 nt, Artificial Sequence
  Description of Artificial Sequence:  Enzymatic Nucleic Acid
  misc_feature (31)..(31): n stands for inosine
ccaagcgccugaugaggccguuaggccgaanucccgca

SEQ ID NO: 3610 - RNA, 38 nt, Artificial Sequence
  Description of Artificial Sequence:  Enzymatic Nucleic Acid
  misc_feature (31)..(31): n stands for inosine
cgcagccacugaugaggccguuaggccgaancgcaguc

SEQ ID NO: 3611 - RNA, 38 nt, Artificial Sequence
  Description of Artificial Sequence:  Enzymatic Nucleic Acid
  misc_feature (31)..(31): n stands for inosine
uccugcgccugaugaggccguuaggccgaanccaagcg

SEQ ID NO: 3612 - RNA, 38 nt, Artificial Sequence
  Description of Artificial Sequence:  Enzymatic Nucleic Acid
  misc_feature (31)..(31): n stands for inosine
ugggcucccugaugaggccguuaggccgaancgcagcc

SEQ ID NO: 3613 - RNA, 38 nt, Artificial Sequence
  Description of Artificial Sequence:  Enzymatic Nucleic Acid
  misc_feature (31)..(31): n stands for inosine
aaccccugcugaugaggccguuaggccgaancuccugc

SEQ ID NO: 3614 - RNA, 38 nt, Artificial Sequence
  Description of Artificial Sequence:  Enzymatic Nucleic Acid
  misc_feature (31)..(31): n stands for inosine
caaccccucugaugaggccguuaggccgaangcuccug

SEQ ID NO: 3615 - RNA, 38 nt, Artificial Sequence
  Description of Artificial Sequence:  Enzymatic Nucleic Acid
  misc_feature (31)..(31): n stands for inosine
ccaacccccugaugaggccguuaggccgaanggcuccu

SEQ ID NO: 3616 - RNA, 38 nt, Artificial Sequence
  Description of Artificial Sequence:  Enzymatic Nucleic Acid
  misc_feature (31)..(31): n stands for inosine
cggaacaccugaugaggccguuaggccgaanccaaccc

SEQ ID NO: 3617 - RNA, 38 nt, Artificial Sequence
  Description of Artificial Sequence:  Enzymatic Nucleic Acid
  misc_feature (31)..(31): n stands for inosine
cugcggcccugaugaggccguuaggccgaanaacacag

SEQ ID NO: 3618 - RNA, 38 nt, Artificial Sequence
  Description of Artificial Sequence:  Enzymatic Nucleic Acid
  misc_feature (31)..(31): n stands for inosine
ugcucugccugaugaggccguuaggccgaanccggaac

SEQ ID NO: 3619 - RNA, 38 nt, Artificial Sequence
  Description of Artificial Sequence:  Enzymatic Nucleic Acid
  misc_feature (31)..(31): n stands for inosine
cggugcuccugaugaggccguuaggccgaancggccgg

SEQ ID NO: 3620 - RNA, 38 nt, Artificial Sequence
  Description of Artificial Sequence:  Enzymatic Nucleic Acid
  misc_feature (31)..(31): n stands for inosine
gcagacggcugaugaggccguuaggccgaancucugcg

SEQ ID NO: 3621 - RNA, 38 nt, Artificial Sequence
  Description of Artificial Sequence:  Enzymatic Nucleic Acid
  misc_feature (31)..(31): n stands for inosine
acgcagaccugaugaggccguuaggccgaanugcucug

SEQ ID NO: 3622 - RNA, 38 nt, Artificial Sequence
  Description of Artificial Sequence:  Enzymatic Nucleic Acid
  misc_feature (31)..(31): n stands for inosine
ccucacgccugaugaggccguuaggccgaanacggugc

SEQ ID NO: 3623 - RNA, 38 nt, Artificial Sequence
  Description of Artificial Sequence:  Enzymatic Nucleic Acid
  misc_feature (31)..(31): n stands for inosine
cuuggccacugaugaggccguuaggccgaanaucuccu

SEQ ID NO: 3624 - RNA, 38 nt, Artificial Sequence
  Description of Artificial Sequence:  Enzymatic Nucleic Acid
  misc_feature (31)..(31): n stands for inosine
acuuggcccugaugaggccguuaggccgaangaucucc

SEQ ID NO: 3625 - RNA, 38 nt, Artificial Sequence
  Description of Artificial Sequence:  Enzymatic Nucleic Acid
  misc_feature (31)..(31): n stands for inosine
aggaacuucugaugaggccguuaggccgaanccaggau

SEQ ID NO: 3626 - RNA, 38 nt, Artificial Sequence
  Description of Artificial Sequence:  Enzymatic Nucleic Acid
  misc_feature (31)..(31): n stands for inosine
caggaacucugaugaggccguuaggccgaangccagga

SEQ ID NO: 3627 - RNA, 38 nt, Artificial Sequence
  Description of Artificial Sequence:  Enzymatic Nucleic Acid
  misc_feature (31)..(31): n stands for inosine
ccagugcacugaugaggccguuaggccgaanaacuugg

SEQ ID NO: 3628 - RNA, 38 nt, Artificial Sequence
  Description of Artificial Sequence:  Enzymatic Nucleic Acid
  misc_feature (31)..(31): n stands for inosine
gccagugccugaugaggccguuaggccgaangaacuug

SEQ ID NO: 3629 - RNA, 38 nt, Artificial Sequence
  Description of Artificial Sequence:  Enzymatic Nucleic Acid
  misc_feature (31)..(31): n stands for inosine
ucagccagcugaugaggccguuaggccgaancaggaac

SEQ ID NO: 3630 - RNA, 38 nt, Artificial Sequence
  Description of Artificial Sequence:  Enzymatic Nucleic Acid
  misc_feature (31)..(31): n stands for inosine
caucagcccugaugaggccguuaggccgaanugcagga

SEQ ID NO: 3631 - RNA, 38 nt, Artificial Sequence
  Description of Artificial Sequence:  Enzymatic Nucleic Acid
  misc_feature (31)..(31): n stands for inosine
cacucauccugaugaggccguuaggccgaanccagugc

SEQ ID NO: 3632 - RNA, 38 nt, Artificial Sequence
  Description of Artificial Sequence:  Enzymatic Nucleic Acid
  misc_feature (31)..(31): n stands for inosine
accugagccugaugaggccguuaggccgaancucgacg

SEQ ID NO: 3633 - RNA, 38 nt, Artificial Sequence
  Description of Artificial Sequence:  Enzymatic Nucleic Acid
  misc_feature (31)..(31): n stands for inosine
aagaccugcugaugaggccguuaggccgaancagcucg

SEQ ID NO: 3634 - RNA, 38 nt, Artificial Sequence
  Description of Artificial Sequence:  Enzymatic Nucleic Acid
  misc_feature (31)..(31): n stands for inosine
gaaagacccugaugaggccguuaggccgaanagcagcu

SEQ ID NO: 3635 - RNA, 38 nt, Artificial Sequence
  Description of Artificial Sequence:  Enzymatic Nucleic Acid
  misc_feature (31)..(31): n stands for inosine
uaaaagaacugaugaggccguuaggccgaanaccugag

SEQ ID NO: 3636 - RNA, 38 nt, Artificial Sequence
  Description of Artificial Sequence:  Enzymatic Nucleic Acid
  misc_feature (31)..(31): n stands for inosine
gacauaaacugaugaggccguuaggccgaanaaagacc

SEQ ID NO: 3637 - RNA, 38 nt, Artificial Sequence
  Description of Artificial Sequence:  Enzymatic Nucleic Acid
  misc_feature (31)..(31): n stands for inosine
ggucuccgcugaugaggccguuaggccgaanacauaaa

SEQ ID NO: 3638 - RNA, 38 nt, Artificial Sequence
  Description of Artificial Sequence:  Enzymatic Nucleic Acid
  misc_feature (31)..(31): n stands for inosine
ugaaacgucugaugaggccguuaggccgaanucuccgu

SEQ ID NO: 3639 - RNA, 38 nt, Artificial Sequence
  Description of Artificial Sequence:  Enzymatic Nucleic Acid
  misc_feature (31)..(31): n stands for inosine
uugaaacgcugaugaggccguuaggccgaangucuccg

SEQ ID NO: 3640 - RNA, 38 nt, Artificial Sequence
  Description of Artificial Sequence:  Enzymatic Nucleic Acid
  misc_feature (31)..(31): n stands for inosine
uguucuuucugaugaggccguuaggccgaanaaacgug

SEQ ID NO: 3641 - RNA, 38 nt, Artificial Sequence
  Description of Artificial Sequence:  Enzymatic Nucleic Acid
  misc_feature (31)..(31): n stands for inosine
aaagagcccugaugaggccguuaggccgaanuucuuuu

SEQ ID NO: 3642 - RNA, 38 nt, Artificial Sequence
  Description of Artificial Sequence:  Enzymatic Nucleic Acid
  misc_feature (31)..(31): n stands for inosine
agaaaaagcugaugaggccguuaggccgaanccuguuc

SEQ ID NO: 3643 - RNA, 38 nt, Artificial Sequence
  Description of Artificial Sequence:  Enzymatic Nucleic Acid
  misc_feature (31)..(31): n stands for inosine
guagaaaacugaugaggccguuaggccgaanagccugu

SEQ ID NO: 3644 - RNA, 38 nt, Artificial Sequence
  Description of Artificial Sequence:  Enzymatic Nucleic Acid
  misc_feature (31)..(31): n stands for inosine
cuuccggucugaugaggccguuaggccgaanaaaaaga

SEQ ID NO: 3645 - RNA, 38 nt, Artificial Sequence
  Description of Artificial Sequence:  Enzymatic Nucleic Acid
  misc_feature (31)..(31): n stands for inosine
acucuucccugaugaggccguuaggccgaanuagaaaa

SEQ ID NO: 3646 - RNA, 38 nt, Artificial Sequence
  Description of Artificial Sequence:  Enzymatic Nucleic Acid
  misc_feature (31)..(31): n stands for inosine
cuugcucccugaugaggccguuaggccgaanacacucu

SEQ ID NO: 3647 - RNA, 38 nt, Artificial Sequence
  Description of Artificial Sequence:  Enzymatic Nucleic Acid
  misc_feature (31)..(31): n stands for inosine
uugcaacucugaugaggccguuaggccgaancuccaga

SEQ ID NO: 3648 - RNA, 38 nt, Artificial Sequence
  Description of Artificial Sequence:  Enzymatic Nucleic Acid
  misc_feature (31)..(31): n stands for inosine
caaugcuucugaugaggccguuaggccgaancaacuug

SEQ ID NO: 3649 - RNA, 38 nt, Artificial Sequence
  Description of Artificial Sequence:  Enzymatic Nucleic Acid
  misc_feature (31)..(31): n stands for inosine
gauuccaacugaugaggccguuaggccgaancuuugca

SEQ ID NO: 3650 - RNA, 38 nt, Artificial Sequence
  Description of Artificial Sequence:  Enzymatic Nucleic Acid
  misc_feature (31)..(31): n stands for inosine
gugcuguccugaugaggccguuaggccgaanauuccaa

SEQ ID NO: 3651 - RNA, 38 nt, Artificial Sequence
  Description of Artificial Sequence:  Enzymatic Nucleic Acid
  misc_feature (31)..(31): n stands for inosine
ucaagugccugaugaggccguuaggccgaanucugauu

SEQ ID NO: 3652 - RNA, 38 nt, Artificial Sequence
  Description of Artificial Sequence:  Enzymatic Nucleic Acid
  misc_feature (31)..(31): n stands for inosine
ucuucaagcugaugaggccguuaggccgaancugucug

SEQ ID NO: 3653 - RNA, 38 nt, Artificial Sequence
  Description of Artificial Sequence:  Enzymatic Nucleic Acid
  misc_feature (31)..(31): n stands for inosine
ccucuucacugaugaggccguuaggccgaanugcuguc

SEQ ID NO: 3654 - RNA, 38 nt, Artificial Sequence
  Description of Artificial Sequence:  Enzymatic Nucleic Acid
  misc_feature (31)..(31): n stands for inosine
cccgcagccugaugaggccguuaggccgaancacccuc

SEQ ID NO: 3655 - RNA, 38 nt, Artificial Sequence
  Description of Artificial Sequence:  Enzymatic Nucleic Acid
  misc_feature (31)..(31): n stands for inosine
gcucccgccugaugaggccguuaggccgaancugcacc

SEQ ID NO: 3656 - RNA, 38 nt, Artificial Sequence
  Description of Artificial Sequence:  Enzymatic Nucleic Acid
  misc_feature (31)..(31): n stands for inosine
cuuccgaccugaugaggccguuaggccgaancucccgc

SEQ ID NO: 3657 - RNA, 38 nt, Artificial Sequence
  Description of Artificial Sequence:  Enzymatic Nucleic Acid
  misc_feature (31)..(31): n stands for inosine
cugaccuccugaugaggccguuaggccgaancuuccga

SEQ ID NO: 3658 - RNA, 38 nt, Artificial Sequence
  Description of Artificial Sequence:  Enzymatic Nucleic Acid
  misc_feature (31)..(31): n stands for inosine
augcugcccugaugaggccguuaggccgaanaccucug

SEQ ID NO: 3659 - RNA, 38 nt, Artificial Sequence
  Description of Artificial Sequence:  Enzymatic Nucleic Acid
  misc_feature (31)..(31): n stands for inosine
cccgaugccugaugaggccguuaggccgaanccugacc

SEQ ID NO: 3660 - RNA, 38 nt, Artificial Sequence
  Description of Artificial Sequence:  Enzymatic Nucleic Acid
  misc_feature (31)..(31): n stands for inosine
cuucccgacugaugaggccguuaggccgaancugccug

SEQ ID NO: 3661 - RNA, 38 nt, Artificial Sequence
  Description of Artificial Sequence:  Enzymatic Nucleic Acid
  misc_feature (31)..(31): n stands for inosine
gcgggccucugaugaggccguuaggccgaancuucccg

SEQ ID NO: 3662 - RNA, 38 nt, Artificial Sequence
  Description of Artificial Sequence:  Enzymatic Nucleic Acid
  misc_feature (31)..(31): n stands for inosine
ggcgggcccugaugaggccguuaggccgaangcuuccc

SEQ ID NO: 3663 - RNA, 38 nt, Artificial Sequence
  Description of Artificial Sequence:  Enzymatic Nucleic Acid
  misc_feature (31)..(31): n stands for inosine
gcagggcgcugaugaggccguuaggccgaanccuggcu

SEQ ID NO: 3664 - RNA, 38 nt, Artificial Sequence
  Description of Artificial Sequence:  Enzymatic Nucleic Acid
  misc_feature (31)..(31): n stands for inosine
agcagggccugaugaggccguuaggccgaangccuggc

SEQ ID NO: 3665 - RNA, 38 nt, Artificial Sequence
  Description of Artificial Sequence:  Enzymatic Nucleic Acid
  misc_feature (31)..(31): n stands for inosine
gucagcagcugaugaggccguuaggccgaancgggccu

SEQ ID NO: 3666 - RNA, 38 nt, Artificial Sequence
  Description of Artificial Sequence:  Enzymatic Nucleic Acid
  misc_feature (31)..(31): n stands for inosine
cgucagcacugaugaggccguuaggccgaangcgggcc

SEQ ID NO: 3667 - RNA, 38 nt, Artificial Sequence
  Description of Artificial Sequence:  Enzymatic Nucleic Acid
  misc_feature (31)..(31): n stands for inosine
acgucagccugaugaggccguuaggccgaanggcgggc

SEQ ID NO: 3668 - RNA, 38 nt, Artificial Sequence
  Description of Artificial Sequence:  Enzymatic Nucleic Acid
  misc_feature (31)..(31): n stands for inosine
uggacguccugaugaggccguuaggccgaancagggcg

SEQ ID NO: 3669 - RNA, 38 nt, Artificial Sequence
  Description of Artificial Sequence:  Enzymatic Nucleic Acid
  misc_feature (31)..(31): n stands for inosine
cggagucucugaugaggccguuaggccgaanacgucag

SEQ ID NO: 3670 - RNA, 38 nt, Artificial Sequence
  Description of Artificial Sequence:  Enzymatic Nucleic Acid
  misc_feature (31)..(31): n stands for inosine
gcggaguccugaugaggccguuaggccgaangacguca

SEQ ID NO: 3671 - RNA, 38 nt, Artificial Sequence
  Description of Artificial Sequence:  Enzymatic Nucleic Acid
  misc_feature (31)..(31): n stands for inosine
ugaagcggcugaugaggccguuaggccgaanucuggac

SEQ ID NO: 3672 - RNA, 38 nt, Artificial Sequence
  Description of Artificial Sequence:  Enzymatic Nucleic Acid
  misc_feature (31)..(31): n stands for inosine
gaugaagccugaugaggccguuaggccgaanagucugg

SEQ ID NO: 3673 - RNA, 38 nt, Artificial Sequence
  Description of Artificial Sequence:  Enzymatic Nucleic Acid
  misc_feature (31)..(31): n stands for inosine
ggggaugacugaugaggccguuaggccgaancggaguc

SEQ ID NO: 3674 - RNA, 38 nt, Artificial Sequence
  Description of Artificial Sequence:  Enzymatic Nucleic Acid
  misc_feature (31)..(31): n stands for inosine
cuuggggacugaugaggccguuaggccgaanaagcgga

SEQ ID NO: 3675 - RNA, 38 nt, Artificial Sequence
  Description of Artificial Sequence:  Enzymatic Nucleic Acid
  misc_feature (31)..(31): n stands for inosine
aggcuuggcugaugaggccguuaggccgaanaugaagc

SEQ ID NO: 3676 - RNA, 38 nt, Artificial Sequence
  Description of Artificial Sequence:  Enzymatic Nucleic Acid
  misc_feature (31)..(31): n stands for inosine
caggcuugcugaugaggccguuaggccgaangaugaag

SEQ ID NO: 3677 - RNA, 38 nt, Artificial Sequence
  Description of Artificial Sequence:  Enzymatic Nucleic Acid
  misc_feature (31)..(31): n stands for inosine
ucaggcuucugaugaggccguuaggccgaanggaugaa

SEQ ID NO: 3678 - RNA, 38 nt, Artificial Sequence
  Description of Artificial Sequence:  Enzymatic Nucleic Acid
  misc_feature (31)..(31): n stands for inosine
gucaggcucugaugaggccguuaggccgaangggauga

SEQ ID NO: 3679 - RNA, 38 nt, Artificial Sequence
  Description of Artificial Sequence:  Enzymatic Nucleic Acid
  misc_feature (31)..(31): n stands for inosine
gcccgucacugaugaggccguuaggccgaancuugggg

SEQ ID NO: 3680 - RNA, 38 nt, Artificial Sequence
  Description of Artificial Sequence:  Enzymatic Nucleic Acid
  misc_feature (31)..(31): n stands for inosine
agcccguccugaugaggccguuaggccgaangcuuggg

SEQ ID NO: 3681 - RNA, 38 nt, Artificial Sequence
  Description of Artificial Sequence:  Enzymatic Nucleic Acid
  misc_feature (31)..(31): n stands for inosine
ucggccgccugaugaggccguuaggccgaancccguca

SEQ ID NO: 3682 - RNA, 38 nt, Artificial Sequence
  Description of Artificial Sequence:  Enzymatic Nucleic Acid
  misc_feature (31)..(31): n stands for inosine
ucacaauccugaugaggccguuaggccgaanccgcagc

SEQ ID NO: 3683 - RNA, 38 nt, Artificial Sequence
  Description of Artificial Sequence:  Enzymatic Nucleic Acid
  misc_feature (31)..(31): n stands for inosine
guaguccacugaugaggccguuaggccgaanuucacaa

SEQ ID NO: 3684 - RNA, 38 nt, Artificial Sequence
  Description of Artificial Sequence:  Enzymatic Nucleic Acid
  misc_feature (31)..(31): n stands for inosine
cacgacgucugaugaggccguuaggccgaanuccaugu

SEQ ID NO: 3685 - RNA, 38 nt, Artificial Sequence
  Description of Artificial Sequence:  Enzymatic Nucleic Acid
  misc_feature (31)..(31): n stands for inosine
aacguucucugaugaggccguuaggccgaancucccac

SEQ ID NO: 3686 - RNA, 38 nt, Artificial Sequence
  Description of Artificial Sequence:  Enzymatic Nucleic Acid
  misc_feature (31)..(31): n stands for inosine
gaacguuccugaugaggccguuaggccgaangcuccca

SEQ ID NO: 3687 - RNA, 38 nt, Artificial Sequence
  Description of Artificial Sequence:  Enzymatic Nucleic Acid
  misc_feature (31)..(31): n stands for inosine
uucucugccugaugaggccguuaggccgaanaacguuc

SEQ ID NO: 3688 - RNA, 38 nt, Artificial Sequence
  Description of Artificial Sequence:  Enzymatic Nucleic Acid
  misc_feature (31)..(31): n stands for inosine
cuuuucuccugaugaggccguuaggccgaancggaacg

SEQ ID NO: 3689 - RNA, 38 nt, Artificial Sequence
  Description of Artificial Sequence:  Enzymatic Nucleic Acid
  misc_feature (31)..(31): n stands for inosine
agacgcuccugaugaggccguuaggccgaancccucuu

SEQ ID NO: 3690 - RNA, 38 nt, Artificial Sequence
  Description of Artificial Sequence:  Enzymatic Nucleic Acid
  misc_feature (31)..(31): n stands for inosine
ucgaggugcugaugaggccguuaggccgaanacgcucg

SEQ ID NO: 3691 - RNA, 38 nt, Artificial Sequence
  Description of Artificial Sequence:  Enzymatic Nucleic Acid
  misc_feature (31)..(31): n stands for inosine
ccucgaggcugaugaggccguuaggccgaanagacgcu

SEQ ID NO: 3692 - RNA, 38 nt, Artificial Sequence
  Description of Artificial Sequence:  Enzymatic Nucleic Acid
  misc_feature (31)..(31): n stands for inosine
acccucgacugaugaggccguuaggccgaanugagacg

SEQ ID NO: 3693 - RNA, 38 nt, Artificial Sequence
  Description of Artificial Sequence:  Enzymatic Nucleic Acid
  misc_feature (31)..(31): n stands for inosine
cacccucgcugaugaggccguuaggccgaangugagac

SEQ ID NO: 3694 - RNA, 38 nt, Artificial Sequence
  Description of Artificial Sequence:  Enzymatic Nucleic Acid
  misc_feature (31)..(31): n stands for inosine
cugaacagcugaugaggccguuaggccgaanccuucac

SEQ ID NO: 3695 - RNA, 38 nt, Artificial Sequence
  Description of Artificial Sequence:  Enzymatic Nucleic Acid
  misc_feature (31)..(31): n stands for inosine
cgcugaaccugaugaggccguuaggccgaanugccuuc

SEQ ID NO: 3696 - RNA, 38 nt, Artificial Sequence
  Description of Artificial Sequence:  Enzymatic Nucleic Acid
  misc_feature (31)..(31): n stands for inosine
gagcacgccugaugaggccguuaggccgaanaacagug

SEQ ID NO: 3697 - RNA, 38 nt, Artificial Sequence
  Description of Artificial Sequence:  Enzymatic Nucleic Acid
  misc_feature (31)..(31): n stands for inosine
cguaguugcugaugaggccguuaggccgaancacgcug

SEQ ID NO: 3698 - RNA, 38 nt, Artificial Sequence
  Description of Artificial Sequence:  Enzymatic Nucleic Acid
  misc_feature (31)..(31): n stands for inosine
cucguagucugaugaggccguuaggccgaanagcacgc

SEQ ID NO: 3699 - RNA, 38 nt, Artificial Sequence
  Description of Artificial Sequence:  Enzymatic Nucleic Acid
  misc_feature (31)..(31): n stands for inosine
ccgcucgucugaugaggccguuaggccgaanuugagca

SEQ ID NO: 3700 - RNA, 38 nt, Artificial Sequence
  Description of Artificial Sequence:  Enzymatic Nucleic Acid
  misc_feature (31)..(31): n stands for inosine
gaggccggcugaugaggccguuaggccgaancgccgcg

SEQ ID NO: 3701 - RNA, 38 nt, Artificial Sequence
  Description of Artificial Sequence:  Enzymatic Nucleic Acid
  misc_feature (31)..(31): n stands for inosine
ggaggccgcugaugaggccguuaggccgaangcgccgc

SEQ ID NO: 3702 - RNA, 38 nt, Artificial Sequence
  Description of Artificial Sequence:  Enzymatic Nucleic Acid
  misc_feature (31)..(31): n stands for inosine
aggaggcccugaugaggccguuaggccgaanggcgccg

SEQ ID NO: 3703 - RNA, 38 nt, Artificial Sequence
  Description of Artificial Sequence:  Enzymatic Nucleic Acid
  misc_feature (31)..(31): n stands for inosine
gcccaggacugaugaggccguuaggccgaanccggggc

SEQ ID NO: 3704 - RNA, 38 nt, Artificial Sequence
  Description of Artificial Sequence:  Enzymatic Nucleic Acid
  misc_feature (31)..(31): n stands for inosine
cgcccaggcugaugaggccguuaggccgaangccgggg

SEQ ID NO: 3705 - RNA, 38 nt, Artificial Sequence
  Description of Artificial Sequence:  Enzymatic Nucleic Acid
  misc_feature (31)..(31): n stands for inosine
ggcgcccacugaugaggccguuaggccgaanaggccgg

SEQ ID NO: 3706 - RNA, 38 nt, Artificial Sequence
  Description of Artificial Sequence:  Enzymatic Nucleic Acid
  misc_feature (31)..(31): n stands for inosine
aggcgccccugaugaggccguuaggccgaangaggccg

SEQ ID NO: 3707 - RNA, 38 nt, Artificial Sequence
  Description of Artificial Sequence:  Enzymatic Nucleic Acid
  misc_feature (31)..(31): n stands for inosine
agcacagacugaugaggccguuaggccgaancgcccag

SEQ ID NO: 3708 - RNA, 38 nt, Artificial Sequence
  Description of Artificial Sequence:  Enzymatic Nucleic Acid
  misc_feature (31)..(31): n stands for inosine
cagcacagcugaugaggccguuaggccgaangcgccca

SEQ ID NO: 3709 - RNA, 38 nt, Artificial Sequence
  Description of Artificial Sequence:  Enzymatic Nucleic Acid
  misc_feature (31)..(31): n stands for inosine
cccagcaccugaugaggccguuaggccgaanaggcgcc

SEQ ID NO: 3710 - RNA, 38 nt, Artificial Sequence
  Description of Artificial Sequence:  Enzymatic Nucleic Acid
  misc_feature (31)..(31): n stands for inosine
ccaggccccugaugaggccguuaggccgaancacagag

SEQ ID NO: 3711 - RNA, 38 nt, Artificial Sequence
  Description of Artificial Sequence:  Enzymatic Nucleic Acid
  misc_feature (31)..(31): n stands for inosine
aucguccacugaugaggccguuaggccgaancccagca

SEQ ID NO: 3712 - RNA, 38 nt, Artificial Sequence
  Description of Artificial Sequence:  Enzymatic Nucleic Acid
  misc_feature (31)..(31): n stands for inosine
uaucgucccugaugaggccguuaggccgaangcccagc

SEQ ID NO: 3713 - RNA, 38 nt, Artificial Sequence
  Description of Artificial Sequence:  Enzymatic Nucleic Acid
  misc_feature (31)..(31): n stands for inosine
ggcccugucugaugaggccguuaggccgaanauaucgu

SEQ ID NO: 3714 - RNA, 38 nt, Artificial Sequence
  Description of Artificial Sequence:  Enzymatic Nucleic Acid
  misc_feature (31)..(31): n stands for inosine
aggcccugcugaugaggccguuaggccgaangauaucg

SEQ ID NO: 3715 - RNA, 38 nt, Artificial Sequence
  Description of Artificial Sequence:  Enzymatic Nucleic Acid
  misc_feature (31)..(31): n stands for inosine
ccaggccccugaugaggccguuaggccgaanuggauau

SEQ ID NO: 3716 - RNA, 38 nt, Artificial Sequence
  Description of Artificial Sequence:  Enzymatic Nucleic Acid
  misc_feature (31)..(31): n stands for inosine
gugcgccacugaugaggccguuaggccgaancccugug

SEQ ID NO: 3717 - RNA, 38 nt, Artificial Sequence
  Description of Artificial Sequence:  Enzymatic Nucleic Acid
  misc_feature (31)..(31): n stands for inosine
ggugcgcccugaugaggccguuaggccgaangcccugu

SEQ ID NO: 3718 - RNA, 38 nt, Artificial Sequence
  Description of Artificial Sequence:  Enzymatic Nucleic Acid
  misc_feature (31)..(31): n stands for inosine
cacgaaggcugaugaggccguuaggccgaancgccagg

SEQ ID NO: 3719 - RNA, 38 nt, Artificial Sequence
  Description of Artificial Sequence:  Enzymatic Nucleic Acid
  misc_feature (31)..(31): n stands for inosine
agcacgaacugaugaggccguuaggccgaanugcgcca

SEQ ID NO: 3720 - RNA, 38 nt, Artificial Sequence
  Description of Artificial Sequence:  Enzymatic Nucleic Acid
  misc_feature (31)..(31): n stands for inosine
cagcacgacugaugaggccguuaggccgaangugcgcc

SEQ ID NO: 3721 - RNA, 38 nt, Artificial Sequence
  Description of Artificial Sequence:  Enzymatic Nucleic Acid
  misc_feature (31)..(31): n stands for inosine
gcacacgccugaugaggccguuaggccgaancacgaag

SEQ ID NO: 3722 - RNA, 38 nt, Artificial Sequence
  Description of Artificial Sequence:  Enzymatic Nucleic Acid
  misc_feature (31)..(31): n stands for inosine
ggguccugcugaugaggccguuaggccgaancccgcac

SEQ ID NO: 3723 - RNA, 38 nt, Artificial Sequence
  Description of Artificial Sequence:  Enzymatic Nucleic Acid
  misc_feature (31)..(31): n stands for inosine
cggguccucugaugaggccguuaggccgaangcccgca

SEQ ID NO: 3724 - RNA, 38 nt, Artificial Sequence
  Description of Artificial Sequence:  Enzymatic Nucleic Acid
  misc_feature (31)..(31): n stands for inosine
gcgggucccugaugaggccguuaggccgaanggcccgc

SEQ ID NO: 3725 - RNA, 38 nt, Artificial Sequence
  Description of Artificial Sequence:  Enzymatic Nucleic Acid
  misc_feature (31)..(31): n stands for inosine
aggcggcgcugaugaggccguuaggccgaanuccuggg

SEQ ID NO: 3726 - RNA, 38 nt, Artificial Sequence
  Description of Artificial Sequence:  Enzymatic Nucleic Acid
  misc_feature (31)..(31): n stands for inosine
caggcggccugaugaggccguuaggccgaanguccugg

SEQ ID NO: 3727 - RNA, 38 nt, Artificial Sequence
  Description of Artificial Sequence:  Enzymatic Nucleic Acid
  misc_feature (31)..(31): n stands for inosine
gcucaggccugaugaggccguuaggccgaancgggucc

SEQ ID NO: 3728 - RNA, 38 nt, Artificial Sequence
  Description of Artificial Sequence:  Enzymatic Nucleic Acid
  misc_feature (31)..(31): n stands for inosine
acagcucacugaugaggccguuaggccgaancggcggg

SEQ ID NO: 3729 - RNA, 38 nt, Artificial Sequence
  Description of Artificial Sequence:  Enzymatic Nucleic Acid
  misc_feature (31)..(31): n stands for inosine
uacagcuccugaugaggccguuaggccgaangcggcgg

SEQ ID NO: 3730 - RNA, 38 nt, Artificial Sequence
  Description of Artificial Sequence:  Enzymatic Nucleic Acid
  misc_feature (31)..(31): n stands for inosine
caaaguaccugaugaggccguuaggccgaancucaggc

SEQ ID NO: 3731 - RNA, 38 nt, Artificial Sequence
  Description of Artificial Sequence:  Enzymatic Nucleic Acid
  misc_feature (31)..(31): n stands for inosine
cuugacaacugaugaggccguuaggccgaanuacagcu

SEQ ID NO: 3732 - RNA, 38 nt, Artificial Sequence
  Description of Artificial Sequence:  Enzymatic Nucleic Acid
  misc_feature (31)..(31): n stands for inosine
auccaccucugaugaggccguuaggccgaanacaaagu

SEQ ID NO: 3733 - RNA, 38 nt, Artificial Sequence
  Description of Artificial Sequence:  Enzymatic Nucleic Acid
  misc_feature (31)..(31): n stands for inosine
ggggauggcugaugaggccguuaggccgaanucguacg

SEQ ID NO: 3734 - RNA, 38 nt, Artificial Sequence
  Description of Artificial Sequence:  Enzymatic Nucleic Acid
  misc_feature (31)..(31): n stands for inosine
ugggggaucugaugaggccguuaggccgaanugucgua

SEQ ID NO: 3735 - RNA, 38 nt, Artificial Sequence
  Description of Artificial Sequence:  Enzymatic Nucleic Acid
  misc_feature (31)..(31): n stands for inosine
cugggggacugaugaggccguuaggccgaangugucgu

SEQ ID NO: 3736 - RNA, 38 nt, Artificial Sequence
  Description of Artificial Sequence:  Enzymatic Nucleic Acid
  misc_feature (31)..(31): n stands for inosine
guccugggcugaugaggccguuaggccgaanauggugu

SEQ ID NO: 3737 - RNA, 38 nt, Artificial Sequence
  Description of Artificial Sequence:  Enzymatic Nucleic Acid
  misc_feature (31)..(31): n stands for inosine
uguccuggcugaugaggccguuaggccgaangauggug

SEQ ID NO: 3738 - RNA, 38 nt, Artificial Sequence
  Description of Artificial Sequence:  Enzymatic Nucleic Acid
  misc_feature (31)..(31): n stands for inosine
cuguccugcugaugaggccguuaggccgaanggauggu

SEQ ID NO: 3739 - RNA, 38 nt, Artificial Sequence
  Description of Artificial Sequence:  Enzymatic Nucleic Acid
  misc_feature (31)..(31): n stands for inosine
ccuguccucugaugaggccguuaggccgaangggaugg

SEQ ID NO: 3740 - RNA, 38 nt, Artificial Sequence
  Description of Artificial Sequence:  Enzymatic Nucleic Acid
  misc_feature (31)..(31): n stands for inosine
gccugucccugaugaggccguuaggccgaanggggaug

SEQ ID NO: 3741 - RNA, 38 nt, Artificial Sequence
  Description of Artificial Sequence:  Enzymatic Nucleic Acid
  misc_feature (31)..(31): n stands for inosine
cgugagcccugaugaggccguuaggccgaanuccuggg

SEQ ID NO: 3742 - RNA, 38 nt, Artificial Sequence
  Description of Artificial Sequence:  Enzymatic Nucleic Acid
  misc_feature (31)..(31): n stands for inosine
ccuccgugcugaugaggccguuaggccgaanccugucc

SEQ ID NO: 3743 - RNA, 38 nt, Artificial Sequence
  Description of Artificial Sequence:  Enzymatic Nucleic Acid
  misc_feature (31)..(31): n stands for inosine
gaccuccgcugaugaggccguuaggccgaanagccugu

SEQ ID NO: 3744 - RNA, 38 nt, Artificial Sequence
  Description of Artificial Sequence:  Enzymatic Nucleic Acid
  misc_feature (31)..(31): n stands for inosine
gcuggcgacugaugaggccguuaggccgaanaccuccg

SEQ ID NO: 3745 - RNA, 38 nt, Artificial Sequence
  Description of Artificial Sequence:  Enzymatic Nucleic Acid
  misc_feature (31)..(31): n stands for inosine
augaugcucugaugaggccguuaggccgaancgaugac

SEQ ID NO: 3746 - RNA, 38 nt, Artificial Sequence
  Description of Artificial Sequence:  Enzymatic Nucleic Acid
  misc_feature (31)..(31): n stands for inosine
gaugaugccugaugaggccguuaggccgaangcgauga

SEQ ID NO: 3747 - RNA, 38 nt, Artificial Sequence
  Description of Artificial Sequence:  Enzymatic Nucleic Acid
  misc_feature (31)..(31): n stands for inosine
uuugaugacugaugaggccguuaggccgaancuggcga

SEQ ID NO: 3748 - RNA, 38 nt, Artificial Sequence
  Description of Artificial Sequence:  Enzymatic Nucleic Acid
  misc_feature (31)..(31): n stands for inosine
ggguuugacugaugaggccguuaggccgaanaugcugg

SEQ ID NO: 3749 - RNA, 38 nt, Artificial Sequence
  Description of Artificial Sequence:  Enzymatic Nucleic Acid
  misc_feature (31)..(31): n stands for inosine
cugggguucugaugaggccguuaggccgaanaugaugc

SEQ ID NO: 3750 - RNA, 38 nt, Artificial Sequence
  Description of Artificial Sequence:  Enzymatic Nucleic Acid
  misc_feature (31)..(31): n stands for inosine
uguucuggcugaugaggccguuaggccgaanuuugaug

SEQ ID NO: 3751 - RNA, 38 nt, Artificial Sequence
  Description of Artificial Sequence:  Enzymatic Nucleic Acid
  misc_feature (31)..(31): n stands for inosine
guguucugcugaugaggccguuaggccgaanguuugau

SEQ ID NO: 3752 - RNA, 38 nt, Artificial Sequence
  Description of Artificial Sequence:  Enzymatic Nucleic Acid
  misc_feature (31)..(31): n stands for inosine
cguguucucugaugaggccguuaggccgaangguuuga

SEQ ID NO: 3753 - RNA, 38 nt, Artificial Sequence
  Description of Artificial Sequence:  Enzymatic Nucleic Acid
  misc_feature (31)..(31): n stands for inosine
acguguuccugaugaggccguuaggccgaanggguuug

SEQ ID NO: 3754 - RNA, 38 nt, Artificial Sequence
  Description of Artificial Sequence:  Enzymatic Nucleic Acid
  misc_feature (31)..(31): n stands for inosine
gcaguacgcugaugaggccguuaggccgaanuucuggg

SEQ ID NO: 3755 - RNA, 38 nt, Artificial Sequence
  Description of Artificial Sequence:  Enzymatic Nucleic Acid
  misc_feature (31)..(31): n stands for inosine
acgcacgccugaugaggccguuaggccgaanuacgugu

SEQ ID NO: 3756 - RNA, 38 nt, Artificial Sequence
  Description of Artificial Sequence:  Enzymatic Nucleic Acid
  misc_feature (31)..(31): n stands for inosine
uggaccaccugaugaggccguuaggccgaancauaccg

SEQ ID NO: 3757 - RNA, 38 nt, Artificial Sequence
  Description of Artificial Sequence:  Enzymatic Nucleic Acid
  misc_feature (31)..(31): n stands for inosine
ggccuucucugaugaggccguuaggccgaanaccacgg

SEQ ID NO: 3758 - RNA, 38 nt, Artificial Sequence
  Description of Artificial Sequence:  Enzymatic Nucleic Acid
  misc_feature (31)..(31): n stands for inosine
cggccuuccugaugaggccguuaggccgaangaccacg

SEQ ID NO: 3759 - RNA, 38 nt, Artificial Sequence
  Description of Artificial Sequence:  Enzymatic Nucleic Acid
  misc_feature (31)..(31): n stands for inosine
ccaugggccugaugaggccguuaggccgaanccuucug

SEQ ID NO: 3760 - RNA, 38 nt, Artificial Sequence
  Description of Artificial Sequence:  Enzymatic Nucleic Acid
  misc_feature (31)..(31): n stands for inosine
ugcccaugcugaugaggccguuaggccgaancggccuu

SEQ ID NO: 3761 - RNA, 38 nt, Artificial Sequence
  Description of Artificial Sequence:  Enzymatic Nucleic Acid
  misc_feature (31)..(31): n stands for inosine
gugcccaucugaugaggccguuaggccgaangcggccu

SEQ ID NO: 3762 - RNA, 38 nt, Artificial Sequence
  Description of Artificial Sequence:  Enzymatic Nucleic Acid
  misc_feature (31)..(31): n stands for inosine
cgugcccacugaugaggccguuaggccgaanggcggcc

SEQ ID NO: 3763 - RNA, 38 nt, Artificial Sequence
  Description of Artificial Sequence:  Enzymatic Nucleic Acid
  misc_feature (31)..(31): n stands for inosine
ugcggacgcugaugaggccguuaggccgaancccaugg

SEQ ID NO: 3764 - RNA, 38 nt, Artificial Sequence
  Description of Artificial Sequence:  Enzymatic Nucleic Acid
  misc_feature (31)..(31): n stands for inosine
ggccuugccugaugaggccguuaggccgaanacgugcc

SEQ ID NO: 3765 - RNA, 38 nt, Artificial Sequence
  Description of Artificial Sequence:  Enzymatic Nucleic Acid
  misc_feature (31)..(31): n stands for inosine
gaaggccucugaugaggccguuaggccgaancggacgu

SEQ ID NO: 3766 - RNA, 38 nt, Artificial Sequence
  Description of Artificial Sequence:  Enzymatic Nucleic Acid
  misc_feature (31)..(31): n stands for inosine
cucuugaacugaugaggccguuaggccgaanccuugcg

SEQ ID NO: 3767 - RNA, 38 nt, Artificial Sequence
  Description of Artificial Sequence:  Enzymatic Nucleic Acid
  misc_feature (31)..(31): n stands for inosine
gcucuugacugaugaggccguuaggccgaangccuugc

SEQ ID NO: 3768 - RNA, 38 nt, Artificial Sequence
  Description of Artificial Sequence:  Enzymatic Nucleic Acid
  misc_feature (31)..(31): n stands for inosine
guggcucucugaugaggccguuaggccgaanaaggccu

SEQ ID NO: 3769 - RNA, 38 nt, Artificial Sequence
  Description of Artificial Sequence:  Enzymatic Nucleic Acid
  misc_feature (31)..(31): n stands for inosine
agagacgucugaugaggccguuaggccgaancucuuga

SEQ ID NO: 3770 - RNA, 38 nt, Artificial Sequence
  Description of Artificial Sequence:  Enzymatic Nucleic Acid
  misc_feature (31)..(31): n stands for inosine
uagagacgcugaugaggccguuaggccgaangcucuug

SEQ ID NO: 3771 - RNA, 38 nt, Artificial Sequence
  Description of Artificial Sequence:  Enzymatic Nucleic Acid
  misc_feature (31)..(31): n stands for inosine
caagguagcugaugaggccguuaggccgaanacguggc

SEQ ID NO: 3772 - RNA, 38 nt, Artificial Sequence
  Description of Artificial Sequence:  Enzymatic Nucleic Acid
  misc_feature (31)..(31): n stands for inosine
gucaaggucugaugaggccguuaggccgaanagacgug

SEQ ID NO: 3773 - RNA, 38 nt, Artificial Sequence
  Description of Artificial Sequence:  Enzymatic Nucleic Acid
  misc_feature (31)..(31): n stands for inosine
ucugucaacugaugaggccguuaggccgaanuagagac

SEQ ID NO: 3774 - RNA, 38 nt, Artificial Sequence
  Description of Artificial Sequence:  Enzymatic Nucleic Acid
  misc_feature (31)..(31): n stands for inosine
gucugucacugaugaggccguuaggccgaanguagaga

SEQ ID NO: 3775 - RNA, 38 nt, Artificial Sequence
  Description of Artificial Sequence:  Enzymatic Nucleic Acid
  misc_feature (31)..(31): n stands for inosine
uggagguccugaugaggccguuaggccgaanucaaggu

SEQ ID NO: 3776 - RNA, 38 nt, Artificial Sequence
  Description of Artificial Sequence:  Enzymatic Nucleic Acid
  misc_feature (31)..(31): n stands for inosine
cggcuggacugaugaggccguuaggccgaanucuguca

SEQ ID NO: 3777 - RNA, 38 nt, Artificial Sequence
  Description of Artificial Sequence:  Enzymatic Nucleic Acid
  misc_feature (31)..(31): n stands for inosine
acggcuggcugaugaggccguuaggccgaangucuguc

SEQ ID NO: 3778 - RNA, 38 nt, Artificial Sequence
  Description of Artificial Sequence:  Enzymatic Nucleic Acid
  misc_feature (31)..(31): n stands for inosine
guacggcucugaugaggccguuaggccgaanaggucug

SEQ ID NO: 3779 - RNA, 38 nt, Artificial Sequence
  Description of Artificial Sequence:  Enzymatic Nucleic Acid
  misc_feature (31)..(31): n stands for inosine
uguacggccugaugaggccguuaggccgaangaggucu

SEQ ID NO: 3780 - RNA, 38 nt, Artificial Sequence
  Description of Artificial Sequence:  Enzymatic Nucleic Acid
  misc_feature (31)..(31): n stands for inosine
gcauguaccugaugaggccguuaggccgaancuggagg

SEQ ID NO: 3781 - RNA, 38 nt, Artificial Sequence
  Description of Artificial Sequence:  Enzymatic Nucleic Acid
  misc_feature (31)..(31): n stands for inosine
cugucgcacugaugaggccguuaggccgaanuacggcu

SEQ ID NO: 3782 - RNA, 38 nt, Artificial Sequence
  Description of Artificial Sequence:  Enzymatic Nucleic Acid
  misc_feature (31)..(31): n stands for inosine
ccacgaaccugaugaggccguuaggccgaanucgcaug

SEQ ID NO: 3783 - RNA, 38 nt, Artificial Sequence
  Description of Artificial Sequence:  Enzymatic Nucleic Acid
  misc_feature (31)..(31): n stands for inosine
ugcaggugcugaugaggccguuaggccgaanccacgaa

SEQ ID NO: 3784 - RNA, 38 nt, Artificial Sequence
  Description of Artificial Sequence:  Enzymatic Nucleic Acid
  misc_feature (31)..(31): n stands for inosine
ccugcaggcugaugaggccguuaggccgaanagccacg

SEQ ID NO: 3785 - RNA, 38 nt, Artificial Sequence
  Description of Artificial Sequence:  Enzymatic Nucleic Acid
  misc_feature (31)..(31): n stands for inosine
cuccugcacugaugaggccguuaggccgaanugagcca

SEQ ID NO: 3786 - RNA, 38 nt, Artificial Sequence
  Description of Artificial Sequence:  Enzymatic Nucleic Acid
  misc_feature (31)..(31): n stands for inosine
ucuccugccugaugaggccguuaggccgaangugagcc

SEQ ID NO: 3787 - RNA, 38 nt, Artificial Sequence
  Description of Artificial Sequence:  Enzymatic Nucleic Acid
  misc_feature (31)..(31): n stands for inosine
uggucucccugaugaggccguuaggccgaancagguga

SEQ ID NO: 3788 - RNA, 38 nt, Artificial Sequence
  Description of Artificial Sequence:  Enzymatic Nucleic Acid
  misc_feature (31)..(31): n stands for inosine
agcgggcucugaugaggccguuaggccgaanucuccug

SEQ ID NO: 3789 - RNA, 38 nt, Artificial Sequence
  Description of Artificial Sequence:  Enzymatic Nucleic Acid
  misc_feature (31)..(31): n stands for inosine
cagcgggccugaugaggccguuaggccgaangucuccu

SEQ ID NO: 3790 - RNA, 38 nt, Artificial Sequence
  Description of Artificial Sequence:  Enzymatic Nucleic Acid
  misc_feature (31)..(31): n stands for inosine
ccucagcgcugaugaggccguuaggccgaancuggucu

SEQ ID NO: 3791 - RNA, 38 nt, Artificial Sequence
  Description of Artificial Sequence:  Enzymatic Nucleic Acid
  misc_feature (31)..(31): n stands for inosine
cccucagccugaugaggccguuaggccgaangcugguc

SEQ ID NO: 3792 - RNA, 38 nt, Artificial Sequence
  Description of Artificial Sequence:  Enzymatic Nucleic Acid
  misc_feature (31)..(31): n stands for inosine
caucccuccugaugaggccguuaggccgaancgggcug

SEQ ID NO: 3793 - RNA, 38 nt, Artificial Sequence
  Description of Artificial Sequence:  Enzymatic Nucleic Acid
  misc_feature (31)..(31): n stands for inosine
augacgaccugaugaggccguuaggccgaancaucccu

SEQ ID NO: 3794 - RNA, 38 nt, Artificial Sequence
  Description of Artificial Sequence:  Enzymatic Nucleic Acid
  misc_feature (31)..(31): n stands for inosine
cugcucgacugaugaggccguuaggccgaanacgacgg

SEQ ID NO: 3795 - RNA, 38 nt, Artificial Sequence
  Description of Artificial Sequence:  Enzymatic Nucleic Acid
  misc_feature (31)..(31): n stands for inosine
aggagcuccugaugaggccguuaggccgaancucgaug

SEQ ID NO: 3796 - RNA, 38 nt, Artificial Sequence
  Description of Artificial Sequence:  Enzymatic Nucleic Acid
  misc_feature (31)..(31): n stands for inosine
cagggaggcugaugaggccguuaggccgaancucugcu

SEQ ID NO: 3797 - RNA, 38 nt, Artificial Sequence
  Description of Artificial Sequence:  Enzymatic Nucleic Acid
  misc_feature (31)..(31): n stands for inosine
uucagggacugaugaggccguuaggccgaanagcucug

SEQ ID NO: 3798 - RNA, 38 nt, Artificial Sequence
  Description of Artificial Sequence:  Enzymatic Nucleic Acid
  misc_feature (31)..(31): n stands for inosine
auucagggcugaugaggccguuaggccgaangagcucu

SEQ ID NO: 3799 - RNA, 38 nt, Artificial Sequence
  Description of Artificial Sequence:  Enzymatic Nucleic Acid
  misc_feature (31)..(31): n stands for inosine
ucauucagcugaugaggccguuaggccgaanaggagcu

SEQ ID NO: 3800 - RNA, 38 nt, Artificial Sequence
  Description of Artificial Sequence:  Enzymatic Nucleic Acid
  misc_feature (31)..(31): n stands for inosine
cucauucacugaugaggccguuaggccgaangaggagc

SEQ ID NO: 3801 - RNA, 38 nt, Artificial Sequence
  Description of Artificial Sequence:  Enzymatic Nucleic Acid
  misc_feature (31)..(31): n stands for inosine
ccucauuccugaugaggccguuaggccgaanggaggag

SEQ ID NO: 3802 - RNA, 38 nt, Artificial Sequence
  Description of Artificial Sequence:  Enzymatic Nucleic Acid
  misc_feature (31)..(31): n stands for inosine
ccacugcucugaugaggccguuaggccgaanccucauu

SEQ ID NO: 3803 - RNA, 38 nt, Artificial Sequence
  Description of Artificial Sequence:  Enzymatic Nucleic Acid
  misc_feature (31)..(31): n stands for inosine
gccacugccugaugaggccguuaggccgaangccucau

SEQ ID NO: 3804 - RNA, 38 nt, Artificial Sequence
  Description of Artificial Sequence:  Enzymatic Nucleic Acid
  misc_feature (31)..(31): n stands for inosine
gaggccaccugaugaggccguuaggccgaancuggccu

SEQ ID NO: 3805 - RNA, 38 nt, Artificial Sequence
  Description of Artificial Sequence:  Enzymatic Nucleic Acid
  misc_feature (31)..(31): n stands for inosine
gucgaagacugaugaggccguuaggccgaanccacugc

SEQ ID NO: 3806 - RNA, 38 nt, Artificial Sequence
  Description of Artificial Sequence:  Enzymatic Nucleic Acid
  misc_feature (31)..(31): n stands for inosine
cgucgaagcugaugaggccguuaggccgaangccacug

SEQ ID NO: 3807 - RNA, 38 nt, Artificial Sequence
  Description of Artificial Sequence:  Enzymatic Nucleic Acid
  misc_feature (31)..(31): n stands for inosine
gacgucgacugaugaggccguuaggccgaanaggccac

SEQ ID NO: 3808 - RNA, 38 nt, Artificial Sequence
  Description of Artificial Sequence:  Enzymatic Nucleic Acid
  misc_feature (31)..(31): n stands for inosine
gcguaggacugaugaggccguuaggccgaanacgucga

SEQ ID NO: 3809 - RNA, 38 nt, Artificial Sequence
  Description of Artificial Sequence:  Enzymatic Nucleic Acid
  misc_feature (31)..(31): n stands for inosine
gaagcguacugaugaggccguuaggccgaanaagacgu

SEQ ID NO: 3810 - RNA, 38 nt, Artificial Sequence
  Description of Artificial Sequence:  Enzymatic Nucleic Acid
  misc_feature (31)..(31): n stands for inosine
ugaagcgucugaugaggccguuaggccgaangaagacg

SEQ ID NO: 3811 - RNA, 38 nt, Artificial Sequence
  Description of Artificial Sequence:  Enzymatic Nucleic Acid
  misc_feature (31)..(31): n stands for inosine
gcacaugacugaugaggccguuaggccgaancguagga

SEQ ID NO: 3812 - RNA, 38 nt, Artificial Sequence
  Description of Artificial Sequence:  Enzymatic Nucleic Acid
  misc_feature (31)..(31): n stands for inosine
guggcacacugaugaggccguuaggccgaanaagcgua

SEQ ID NO: 3813 - RNA, 38 nt, Artificial Sequence
  Description of Artificial Sequence:  Enzymatic Nucleic Acid
  misc_feature (31)..(31): n stands for inosine
ggcguggucugaugaggccguuaggccgaancacauga

SEQ ID NO: 3814 - RNA, 38 nt, Artificial Sequence
  Description of Artificial Sequence:  Enzymatic Nucleic Acid
  misc_feature (31)..(31): n stands for inosine
cggcguggcugaugaggccguuaggccgaangcacaug

SEQ ID NO: 3815 - RNA, 38 nt, Artificial Sequence
  Description of Artificial Sequence:  Enzymatic Nucleic Acid
  misc_feature (31)..(31): n stands for inosine
cacggcgucugaugaggccguuaggccgaanuggcaca

SEQ ID NO: 3816 - RNA, 38 nt, Artificial Sequence
  Description of Artificial Sequence:  Enzymatic Nucleic Acid
  misc_feature (31)..(31): n stands for inosine
gcacggcgcugaugaggccguuaggccgaanguggcac

SEQ ID NO: 3817 - RNA, 38 nt, Artificial Sequence
  Description of Artificial Sequence:  Enzymatic Nucleic Acid
  misc_feature (31)..(31): n stands for inosine
augcgcaccugaugaggccguuaggccgaancguggug

SEQ ID NO: 3818 - RNA, 38 nt, Artificial Sequence
  Description of Artificial Sequence:  Enzymatic Nucleic Acid
  misc_feature (31)..(31): n stands for inosine
gccccugacugaugaggccguuaggccgaancgcacgg

SEQ ID NO: 3819 - RNA, 38 nt, Artificial Sequence
  Description of Artificial Sequence:  Enzymatic Nucleic Acid
  misc_feature (31)..(31): n stands for inosine
cuugcccccugaugaggccguuaggccgaanaugcgca

SEQ ID NO: 3820 - RNA, 38 nt, Artificial Sequence
  Description of Artificial Sequence:  Enzymatic Nucleic Acid
  misc_feature (31)..(31): n stands for inosine
guaggacucugaugaggccguuaggccgaanccccuga

SEQ ID NO: 3821 - RNA, 38 nt, Artificial Sequence
  Description of Artificial Sequence:  Enzymatic Nucleic Acid
  misc_feature (31)..(31): n stands for inosine
uggacguacugaugaggccguuaggccgaanacuugcc

SEQ ID NO: 3822 - RNA, 38 nt, Artificial Sequence
  Description of Artificial Sequence:  Enzymatic Nucleic Acid
  misc_feature (31)..(31): n stands for inosine
cuggacgucugaugaggccguuaggccgaangacuugc

SEQ ID NO: 3823 - RNA, 38 nt, Artificial Sequence
  Description of Artificial Sequence:  Enzymatic Nucleic Acid
  misc_feature (31)..(31): n stands for inosine
cuggcacucugaugaggccguuaggccgaanacguagg

SEQ ID NO: 3824 - RNA, 38 nt, Artificial Sequence
  Description of Artificial Sequence:  Enzymatic Nucleic Acid
  misc_feature (31)..(31): n stands for inosine
ccuggcaccugaugaggccguuaggccgaangacguag

SEQ ID NO: 3825 - RNA, 38 nt, Artificial Sequence
  Description of Artificial Sequence:  Enzymatic Nucleic Acid
  misc_feature (31)..(31): n stands for inosine
gauccccucugaugaggccguuaggccgaancacugga

SEQ ID NO: 3826 - RNA, 38 nt, Artificial Sequence
  Description of Artificial Sequence:  Enzymatic Nucleic Acid
  misc_feature (31)..(31): n stands for inosine
ggaucccccugaugaggccguuaggccgaangcacugg

SEQ ID NO: 3827 - RNA, 38 nt, Artificial Sequence
  Description of Artificial Sequence:  Enzymatic Nucleic Acid
  misc_feature (31)..(31): n stands for inosine
gcccugcgcugaugaggccguuaggccgaanauccccu

SEQ ID NO: 3828 - RNA, 38 nt, Artificial Sequence
  Description of Artificial Sequence:  Enzymatic Nucleic Acid
  misc_feature (31)..(31): n stands for inosine
agcccugccugaugaggccguuaggccgaangaucccc

SEQ ID NO: 3829 - RNA, 38 nt, Artificial Sequence
  Description of Artificial Sequence:  Enzymatic Nucleic Acid
  misc_feature (31)..(31): n stands for inosine
uggagccccugaugaggccguuaggccgaancgggauc

SEQ ID NO: 3830 - RNA, 38 nt, Artificial Sequence
  Description of Artificial Sequence:  Enzymatic Nucleic Acid
  misc_feature (31)..(31): n stands for inosine
gaggauggcugaugaggccguuaggccgaancccugcg

SEQ ID NO: 3831 - RNA, 38 nt, Artificial Sequence
  Description of Artificial Sequence:  Enzymatic Nucleic Acid
  misc_feature (31)..(31): n stands for inosine
gagaggaucugaugaggccguuaggccgaanagcccug

SEQ ID NO: 3832 - RNA, 38 nt, Artificial Sequence
  Description of Artificial Sequence:  Enzymatic Nucleic Acid
  misc_feature (31)..(31): n stands for inosine
ggagaggacugaugaggccguuaggccgaangagcccu

SEQ ID NO: 3833 - RNA, 38 nt, Artificial Sequence
  Description of Artificial Sequence:  Enzymatic Nucleic Acid
  misc_feature (31)..(31): n stands for inosine
cguggagacugaugaggccguuaggccgaanauggagc

SEQ ID NO: 3834 - RNA, 38 nt, Artificial Sequence
  Description of Artificial Sequence:  Enzymatic Nucleic Acid
  misc_feature (31)..(31): n stands for inosine
gcguggagcugaugaggccguuaggccgaangauggag

SEQ ID NO: 3835 - RNA, 38 nt, Artificial Sequence
  Description of Artificial Sequence:  Enzymatic Nucleic Acid
  misc_feature (31)..(31): n stands for inosine
cagcguggcugaugaggccguuaggccgaanaggaugg

SEQ ID NO: 3836 - RNA, 38 nt, Artificial Sequence
  Description of Artificial Sequence:  Enzymatic Nucleic Acid
  misc_feature (31)..(31): n stands for inosine
agcagcgucugaugaggccguuaggccgaanagaggau

SEQ ID NO: 3837 - RNA, 38 nt, Artificial Sequence
  Description of Artificial Sequence:  Enzymatic Nucleic Acid
  misc_feature (31)..(31): n stands for inosine
gagcagcgcugaugaggccguuaggccgaangagagga

SEQ ID NO: 3838 - RNA, 38 nt, Artificial Sequence
  Description of Artificial Sequence:  Enzymatic Nucleic Acid
  misc_feature (31)..(31): n stands for inosine
ugcagagccugaugaggccguuaggccgaancguggag

SEQ ID NO: 3839 - RNA, 38 nt, Artificial Sequence
  Description of Artificial Sequence:  Enzymatic Nucleic Acid
  misc_feature (31)..(31): n stands for inosine
ggcugcagcugaugaggccguuaggccgaancagcgug

SEQ ID NO: 3840 - RNA, 38 nt, Artificial Sequence
  Description of Artificial Sequence:  Enzymatic Nucleic Acid
  misc_feature (31)..(31): n stands for inosine
caggcugccugaugaggccguuaggccgaanagcagcg

SEQ ID NO: 3841 - RNA, 38 nt, Artificial Sequence
  Description of Artificial Sequence:  Enzymatic Nucleic Acid
  misc_feature (31)..(31): n stands for inosine
gcacaggccugaugaggccguuaggccgaancagagca

SEQ ID NO: 3842 - RNA, 38 nt, Artificial Sequence
  Description of Artificial Sequence:  Enzymatic Nucleic Acid
  misc_feature (31)..(31): n stands for inosine
guagcacacugaugaggccguuaggccgaancugcaga

SEQ ID NO: 3843 - RNA, 38 nt, Artificial Sequence
  Description of Artificial Sequence:  Enzymatic Nucleic Acid
  misc_feature (31)..(31): n stands for inosine
cguagcaccugaugaggccguuaggccgaangcugcag

SEQ ID NO: 3844 - RNA, 38 nt, Artificial Sequence
  Description of Artificial Sequence:  Enzymatic Nucleic Acid
  misc_feature (31)..(31): n stands for inosine
gucgccgucugaugaggccguuaggccgaancacaggc

SEQ ID NO: 3845 - RNA, 38 nt, Artificial Sequence
  Description of Artificial Sequence:  Enzymatic Nucleic Acid
  misc_feature (31)..(31): n stands for inosine
guucuccacugaugaggccguuaggccgaanucgccgu

SEQ ID NO: 3846 - RNA, 38 nt, Artificial Sequence
  Description of Artificial Sequence:  Enzymatic Nucleic Acid
  misc_feature (31)..(31): n stands for inosine
aaacagcucugaugaggccguuaggccgaanuucucca

SEQ ID NO: 3847 - RNA, 38 nt, Artificial Sequence
  Description of Artificial Sequence:  Enzymatic Nucleic Acid
  misc_feature (31)..(31): n stands for inosine
ccgcaaaccugaugaggccguuaggccgaancuuguuc

SEQ ID NO: 3848 - RNA, 38 nt, Artificial Sequence
  Description of Artificial Sequence:  Enzymatic Nucleic Acid
  misc_feature (31)..(31): n stands for inosine
gcaggagccugaugaggccguuaggccgaancccgucc

SEQ ID NO: 3849 - RNA, 38 nt, Artificial Sequence
  Description of Artificial Sequence:  Enzymatic Nucleic Acid
  misc_feature (31)..(31): n stands for inosine
aacgcaggcugaugaggccguuaggccgaancagcccg

SEQ ID NO: 3850 - RNA, 38 nt, Artificial Sequence
  Description of Artificial Sequence:  Enzymatic Nucleic Acid
  misc_feature (31)..(31): n stands for inosine
caaacgcacugaugaggccguuaggccgaanagcagcc

SEQ ID NO: 3851 - RNA, 38 nt, Artificial Sequence
  Description of Artificial Sequence:  Enzymatic Nucleic Acid
  misc_feature (31)..(31): n stands for inosine
ccaaacgccugaugaggccguuaggccgaangagcagc

SEQ ID NO: 3852 - RNA, 38 nt, Artificial Sequence
  Description of Artificial Sequence:  Enzymatic Nucleic Acid
  misc_feature (31)..(31): n stands for inosine
caccaacacugaugaggccguuaggccgaanaaaucau

SEQ ID NO: 3853 - RNA, 38 nt, Artificial Sequence
  Description of Artificial Sequence:  Enzymatic Nucleic Acid
  misc_feature (31)..(31): n stands for inosine
aggugaggcugaugaggccguuaggccgaanucaccaa

SEQ ID NO: 3854 - RNA, 38 nt, Artificial Sequence
  Description of Artificial Sequence:  Enzymatic Nucleic Acid
  misc_feature (31)..(31): n stands for inosine
ugaggugacugaugaggccguuaggccgaanugucacc

SEQ ID NO: 3855 - RNA, 38 nt, Artificial Sequence
  Description of Artificial Sequence:  Enzymatic Nucleic Acid
  misc_feature (31)..(31): n stands for inosine
gugaggugcugaugaggccguuaggccgaangugucac

SEQ ID NO: 3856 - RNA, 38 nt, Artificial Sequence
  Description of Artificial Sequence:  Enzymatic Nucleic Acid
  misc_feature (31)..(31): n stands for inosine
gggugaggcugaugaggccguuaggccgaanagguguc

SEQ ID NO: 3857 - RNA, 38 nt, Artificial Sequence
  Description of Artificial Sequence:  Enzymatic Nucleic Acid
  misc_feature (31)..(31): n stands for inosine
gugggugacugaugaggccguuaggccgaanugaggug

SEQ ID NO: 3858 - RNA, 38 nt, Artificial Sequence
  Description of Artificial Sequence:  Enzymatic Nucleic Acid
  misc_feature (31)..(31): n stands for inosine
cgugggugcugaugaggccguuaggccgaangugaggu

SEQ ID NO: 3859 - RNA, 38 nt, Artificial Sequence
  Description of Artificial Sequence:  Enzymatic Nucleic Acid
  misc_feature (31)..(31): n stands for inosine
cgcgugggcugaugaggccguuaggccgaanaggugag

SEQ ID NO: 3860 - RNA, 38 nt, Artificial Sequence
  Description of Artificial Sequence:  Enzymatic Nucleic Acid
  misc_feature (31)..(31): n stands for inosine
uucgcgugcugaugaggccguuaggccgaanugaggug

SEQ ID NO: 3861 - RNA, 38 nt, Artificial Sequence
  Description of Artificial Sequence:  Enzymatic Nucleic Acid
  misc_feature (31)..(31): n stands for inosine
uuucgcgucugaugaggccguuaggccgaangugaggu

SEQ ID NO: 3862 - RNA, 38 nt, Artificial Sequence
  Description of Artificial Sequence:  Enzymatic Nucleic Acid
  misc_feature (31)..(31): n stands for inosine
uuuucgcgcugaugaggccguuaggccgaanggugagg

SEQ ID NO: 3863 - RNA, 38 nt, Artificial Sequence
  Description of Artificial Sequence:  Enzymatic Nucleic Acid
  misc_feature (31)..(31): n stands for inosine
cugaggaacugaugaggccguuaggccgaanuuuucgc

SEQ ID NO: 3864 - RNA, 38 nt, Artificial Sequence
  Description of Artificial Sequence:  Enzymatic Nucleic Acid
  misc_feature (31)..(31): n stands for inosine
ccugaggacugaugaggccguuaggccgaanguuuucg

SEQ ID NO: 3865 - RNA, 38 nt, Artificial Sequence
  Description of Artificial Sequence:  Enzymatic Nucleic Acid
  misc_feature (31)..(31): n stands for inosine
gguccugacugaugaggccguuaggccgaanaagguuu

SEQ ID NO: 3866 - RNA, 38 nt, Artificial Sequence
  Description of Artificial Sequence:  Enzymatic Nucleic Acid
  misc_feature (31)..(31): n stands for inosine
ggguccugcugaugaggccguuaggccgaangaagguu

SEQ ID NO: 3867 - RNA, 38 nt, Artificial Sequence
  Description of Artificial Sequence:  Enzymatic Nucleic Acid
  misc_feature (31)..(31): n stands for inosine
cagggucccugaugaggccguuaggccgaanaggaagg

SEQ ID NO: 3868 - RNA, 38 nt, Artificial Sequence
  Description of Artificial Sequence:  Enzymatic Nucleic Acid
  misc_feature (31)..(31): n stands for inosine
cggaccagcugaugaggccguuaggccgaanuccugag

SEQ ID NO: 3869 - RNA, 38 nt, Artificial Sequence
  Description of Artificial Sequence:  Enzymatic Nucleic Acid
  misc_feature (31)..(31): n stands for inosine
ucggaccacugaugaggccguuaggccgaanguccuga

SEQ ID NO: 3870 - RNA, 38 nt, Artificial Sequence
  Description of Artificial Sequence:  Enzymatic Nucleic Acid
  misc_feature (31)..(31): n stands for inosine
cucggacccugaugaggccguuaggccgaangguccug

SEQ ID NO: 3871 - RNA, 38 nt, Artificial Sequence
  Description of Artificial Sequence:  Enzymatic Nucleic Acid
  misc_feature (31)..(31): n stands for inosine
gacaccuccugaugaggccguuaggccgaanaccaggg

SEQ ID NO: 3872 - RNA, 38 nt, Artificial Sequence
  Description of Artificial Sequence:  Enzymatic Nucleic Acid
  misc_feature (31)..(31): n stands for inosine
auacucagcugaugaggccguuaggccgaanacaccuc

SEQ ID NO: 3873 - RNA, 38 nt, Artificial Sequence
  Description of Artificial Sequence:  Enzymatic Nucleic Acid
  misc_feature (31)..(31): n stands for inosine
cauacucacugaugaggccguuaggccgaangacaccu

SEQ ID NO: 3874 - RNA, 38 nt, Artificial Sequence
  Description of Artificial Sequence:  Enzymatic Nucleic Acid
  misc_feature (31)..(31): n stands for inosine
ccauacuccugaugaggccguuaggccgaanggacacc

SEQ ID NO: 3875 - RNA, 38 nt, Artificial Sequence
  Description of Artificial Sequence:  Enzymatic Nucleic Acid
  misc_feature (31)..(31): n stands for inosine
caccacgccugaugaggccguuaggccgaanccauacu

SEQ ID NO: 3876 - RNA, 38 nt, Artificial Sequence
  Description of Artificial Sequence:  Enzymatic Nucleic Acid
  misc_feature (31)..(31): n stands for inosine
cuuccgcacugaugaggccguuaggccgaanuucacca

SEQ ID NO: 3877 - RNA, 38 nt, Artificial Sequence
  Description of Artificial Sequence:  Enzymatic Nucleic Acid
  misc_feature (31)..(31): n stands for inosine
uucaccaccugaugaggccguuaggccgaanucuuccg

SEQ ID NO: 3878 - RNA, 38 nt, Artificial Sequence
  Description of Artificial Sequence:  Enzymatic Nucleic Acid
  misc_feature (31)..(31): n stands for inosine
uacagggacugaugaggccguuaggccgaanuucacca

SEQ ID NO: 3879 - RNA, 38 nt, Artificial Sequence
  Description of Artificial Sequence:  Enzymatic Nucleic Acid
  misc_feature (31)..(31): n stands for inosine
uucuacagcugaugaggccguuaggccgaanaaguuca

SEQ ID NO: 3880 - RNA, 38 nt, Artificial Sequence
  Description of Artificial Sequence:  Enzymatic Nucleic Acid
  misc_feature (31)..(31): n stands for inosine
cuucuacacugaugaggccguuaggccgaangaaguuc

SEQ ID NO: 3881 - RNA, 38 nt, Artificial Sequence
  Description of Artificial Sequence:  Enzymatic Nucleic Acid
  misc_feature (31)..(31): n stands for inosine
ucuucuaccugaugaggccguuaggccgaanggaaguu

SEQ ID NO: 3882 - RNA, 38 nt, Artificial Sequence
  Description of Artificial Sequence:  Enzymatic Nucleic Acid
  misc_feature (31)..(31): n stands for inosine
ccacccagcugaugaggccguuaggccgaanccucguc

SEQ ID NO: 3883 - RNA, 38 nt, Artificial Sequence
  Description of Artificial Sequence:  Enzymatic Nucleic Acid
  misc_feature (31)..(31): n stands for inosine
gccacccacugaugaggccguuaggccgaangccucgu

SEQ ID NO: 3884 - RNA, 38 nt, Artificial Sequence
  Description of Artificial Sequence:  Enzymatic Nucleic Acid
  misc_feature (31)..(31): n stands for inosine
ugccaccccugaugaggccguuaggccgaanggccucg

SEQ ID NO: 3885 - RNA, 38 nt, Artificial Sequence
  Description of Artificial Sequence:  Enzymatic Nucleic Acid
  misc_feature (31)..(31): n stands for inosine
aaaagccgcugaugaggccguuaggccgaanccaccca

SEQ ID NO: 3886 - RNA, 38 nt, Artificial Sequence
  Description of Artificial Sequence:  Enzymatic Nucleic Acid
  misc_feature (31)..(31): n stands for inosine
ugaacaaacugaugaggccguuaggccgaanccgugcc

SEQ ID NO: 3887 - RNA, 38 nt, Artificial Sequence
  Description of Artificial Sequence:  Enzymatic Nucleic Acid
  misc_feature (31)..(31): n stands for inosine
ccggcauccugaugaggccguuaggccgaanaacaaaa

SEQ ID NO: 3888 - RNA, 38 nt, Artificial Sequence
  Description of Artificial Sequence:  Enzymatic Nucleic Acid
  misc_feature (31)..(31): n stands for inosine
cgugggcccugaugaggccguuaggccgaancaucuga

SEQ ID NO: 3889 - RNA, 38 nt, Artificial Sequence
  Description of Artificial Sequence:  Enzymatic Nucleic Acid
  misc_feature (31)..(31): n stands for inosine
aggccgugcugaugaggccguuaggccgaanccggcau

SEQ ID NO: 3890 - RNA, 38 nt, Artificial Sequence
  Description of Artificial Sequence:  Enzymatic Nucleic Acid
  misc_feature (31)..(31): n stands for inosine
uaggccgucugaugaggccguuaggccgaangccggca

SEQ ID NO: 3891 - RNA, 38 nt, Artificial Sequence
  Description of Artificial Sequence:  Enzymatic Nucleic Acid
  misc_feature (31)..(31): n stands for inosine
auaggccgcugaugaggccguuaggccgaanggccggc

SEQ ID NO: 3892 - RNA, 38 nt, Artificial Sequence
  Description of Artificial Sequence:  Enzymatic Nucleic Acid
  misc_feature (31)..(31): n stands for inosine
ggggaauacugaugaggccguuaggccgaanccguggg

SEQ ID NO: 3893 - RNA, 38 nt, Artificial Sequence
  Description of Artificial Sequence:  Enzymatic Nucleic Acid
  misc_feature (31)..(31): n stands for inosine
aggggaaucugaugaggccguuaggccgaangccgugg

SEQ ID NO: 3894 - RNA, 38 nt, Artificial Sequence
  Description of Artificial Sequence:  Enzymatic Nucleic Acid
  misc_feature (31)..(31): n stands for inosine
gcaccaggcugaugaggccguuaggccgaanaauaggc

SEQ ID NO: 3895 - RNA, 38 nt, Artificial Sequence
  Description of Artificial Sequence:  Enzymatic Nucleic Acid
  misc_feature (31)..(31): n stands for inosine
cgcaccagcugaugaggccguuaggccgaangaauagg

SEQ ID NO: 3896 - RNA, 38 nt, Artificial Sequence
  Description of Artificial Sequence:  Enzymatic Nucleic Acid
  misc_feature (31)..(31): n stands for inosine
ccgcaccacugaugaggccguuaggccgaanggaauag

SEQ ID NO: 3897 - RNA, 38 nt, Artificial Sequence
  Description of Artificial Sequence:  Enzymatic Nucleic Acid
  misc_feature (31)..(31): n stands for inosine
gccgcacccugaugaggccguuaggccgaangggaaua

SEQ ID NO: 3898 - RNA, 38 nt, Artificial Sequence
  Description of Artificial Sequence:  Enzymatic Nucleic Acid
  misc_feature (31)..(31): n stands for inosine
cagcagcacugaugaggccguuaggccgaanccgcacc

SEQ ID NO: 3899 - RNA, 38 nt, Artificial Sequence
  Description of Artificial Sequence:  Enzymatic Nucleic Acid
  misc_feature (31)..(31): n stands for inosine
ccagcagccugaugaggccguuaggccgaangccgcac

SEQ ID NO: 3900 - RNA, 38 nt, Artificial Sequence
  Description of Artificial Sequence:  Enzymatic Nucleic Acid
  misc_feature (31)..(31): n stands for inosine
uauccagccugaugaggccguuaggccgaancaggccg

SEQ ID NO: 3901 - RNA, 38 nt, Artificial Sequence
  Description of Artificial Sequence:  Enzymatic Nucleic Acid
  misc_feature (31)..(31): n stands for inosine
ggguaucccugaugaggccguuaggccgaancagcagg

SEQ ID NO: 3902 - RNA, 38 nt, Artificial Sequence
  Description of Artificial Sequence:  Enzymatic Nucleic Acid
  misc_feature (31)..(31): n stands for inosine
aggguccgcugaugaggccguuaggccgaanuauccag

SEQ ID NO: 3903 - RNA, 38 nt, Artificial Sequence
  Description of Artificial Sequence:  Enzymatic Nucleic Acid
  misc_feature (31)..(31): n stands for inosine
cagggucccugaugaggccguuaggccgaanguaucca

SEQ ID NO: 3904 - RNA, 38 nt, Artificial Sequence
  Description of Artificial Sequence:  Enzymatic Nucleic Acid
  misc_feature (31)..(31): n stands for inosine
accuccagcugaugaggccguuaggccgaanuccgggu

SEQ ID NO: 3905 - RNA, 38 nt, Artificial Sequence
  Description of Artificial Sequence:  Enzymatic Nucleic Acid
  misc_feature (31)..(31): n stands for inosine
caccuccacugaugaggccguuaggccgaanguccggg

SEQ ID NO: 3906 - RNA, 38 nt, Artificial Sequence
  Description of Artificial Sequence:  Enzymatic Nucleic Acid
  misc_feature (31)..(31): n stands for inosine
gcaccucccugaugaggccguuaggccgaangguccgg

SEQ ID NO: 3907 - RNA, 38 nt, Artificial Sequence
  Description of Artificial Sequence:  Enzymatic Nucleic Acid
  misc_feature (31)..(31): n stands for inosine
agucgcuccugaugaggccguuaggccgaancaccucc

SEQ ID NO: 3908 - RNA, 38 nt, Artificial Sequence
  Description of Artificial Sequence:  Enzymatic Nucleic Acid
  misc_feature (31)..(31): n stands for inosine
gcuggagucugaugaggccguuaggccgaanucgcucu

SEQ ID NO: 3909 - RNA, 38 nt, Artificial Sequence
  Description of Artificial Sequence:  Enzymatic Nucleic Acid
  misc_feature (31)..(31): n stands for inosine
auagcuggcugaugaggccguuaggccgaanuagucgc

SEQ ID NO: 3910 - RNA, 38 nt, Artificial Sequence
  Description of Artificial Sequence:  Enzymatic Nucleic Acid
  misc_feature (31)..(31): n stands for inosine
gcauagcucugaugaggccguuaggccgaanaguaguc

SEQ ID NO: 3911 - RNA, 38 nt, Artificial Sequence
  Description of Artificial Sequence:  Enzymatic Nucleic Acid
  misc_feature (31)..(31): n stands for inosine
ggcauagccugaugaggccguuaggccgaangaguagu

SEQ ID NO: 3912 - RNA, 38 nt, Artificial Sequence
  Description of Artificial Sequence:  Enzymatic Nucleic Acid
  misc_feature (31)..(31): n stands for inosine
ccgggcaucugaugaggccguuaggccgaancuggagu

SEQ ID NO: 3913 - RNA, 38 nt, Artificial Sequence
  Description of Artificial Sequence:  Enzymatic Nucleic Acid
  misc_feature (31)..(31): n stands for inosine
gagguccgcugaugaggccguuaggccgaancauagcu

SEQ ID NO: 3914 - RNA, 38 nt, Artificial Sequence
  Description of Artificial Sequence:  Enzymatic Nucleic Acid
  misc_feature (31)..(31): n stands for inosine
ggaggucccugaugaggccguuaggccgaangcauagc

SEQ ID NO: 3915 - RNA, 38 nt, Artificial Sequence
  Description of Artificial Sequence:  Enzymatic Nucleic Acid
  misc_feature (31)..(31): n stands for inosine
cugauggacugaugaggccguuaggccgaanuccgggc

SEQ ID NO: 3916 - RNA, 38 nt, Artificial Sequence
  Description of Artificial Sequence:  Enzymatic Nucleic Acid
  misc_feature (31)..(31): n stands for inosine
ucugauggcugaugaggccguuaggccgaanguccggg

SEQ ID NO: 3917 - RNA, 38 nt, Artificial Sequence
  Description of Artificial Sequence:  Enzymatic Nucleic Acid
  misc_feature (31)..(31): n stands for inosine
gcucugaucugaugaggccguuaggccgaanagguccg

SEQ ID NO: 3918 - RNA, 38 nt, Artificial Sequence
  Description of Artificial Sequence:  Enzymatic Nucleic Acid
  misc_feature (31)..(31): n stands for inosine
ggcucugacugaugaggccguuaggccgaangaggucc

SEQ ID NO: 3919 - RNA, 38 nt, Artificial Sequence
  Description of Artificial Sequence:  Enzymatic Nucleic Acid
  misc_feature (31)..(31): n stands for inosine
acuggcuccugaugaggccguuaggccgaanauggagg

SEQ ID NO: 3920 - RNA, 38 nt, Artificial Sequence
  Description of Artificial Sequence:  Enzymatic Nucleic Acid
  misc_feature (31)..(31): n stands for inosine
gugagacucugaugaggccguuaggccgaancucugau

SEQ ID NO: 3921 - RNA, 38 nt, Artificial Sequence
  Description of Artificial Sequence:  Enzymatic Nucleic Acid
  misc_feature (31)..(31): n stands for inosine
ggugagaccugaugaggccguuaggccgaangcucuga

SEQ ID NO: 3922 - RNA, 38 nt, Artificial Sequence
  Description of Artificial Sequence:  Enzymatic Nucleic Acid
  misc_feature (31)..(31): n stands for inosine
ugaaggugcugaugaggccguuaggccgaanacuggcu

SEQ ID NO: 3923 - RNA, 38 nt, Artificial Sequence
  Description of Artificial Sequence:  Enzymatic Nucleic Acid
  misc_feature (31)..(31): n stands for inosine
guugaaggcugaugaggccguuaggccgaanagacugg

SEQ ID NO: 3924 - RNA, 38 nt, Artificial Sequence
  Description of Artificial Sequence:  Enzymatic Nucleic Acid
  misc_feature (31)..(31): n stands for inosine
cgguugaacugaugaggccguuaggccgaanugagacu

SEQ ID NO: 3925 - RNA, 38 nt, Artificial Sequence
  Description of Artificial Sequence:  Enzymatic Nucleic Acid
  misc_feature (31)..(31): n stands for inosine
gcgguugacugaugaggccguuaggccgaangugagac

SEQ ID NO: 3926 - RNA, 38 nt, Artificial Sequence
  Description of Artificial Sequence:  Enzymatic Nucleic Acid
  misc_feature (31)..(31): n stands for inosine
gccgcggucugaugaggccguuaggccgaanaagguga

SEQ ID NO: 3927 - RNA, 38 nt, Artificial Sequence
  Description of Artificial Sequence:  Enzymatic Nucleic Acid
  misc_feature (31)..(31): n stands for inosine
gaagccgccugaugaggccguuaggccgaanuugaagg

SEQ ID NO: 3928 - RNA, 38 nt, Artificial Sequence
  Description of Artificial Sequence:  Enzymatic Nucleic Acid
  misc_feature (31)..(31): n stands for inosine
agccuugacugaugaggccguuaggccgaanccgcggu

SEQ ID NO: 3929 - RNA, 38 nt, Artificial Sequence
  Description of Artificial Sequence:  Enzymatic Nucleic Acid
  misc_feature (31)..(31): n stands for inosine
cccagccucugaugaggccguuaggccgaanaagccgc

SEQ ID NO: 3930 - RNA, 38 nt, Artificial Sequence
  Description of Artificial Sequence:  Enzymatic Nucleic Acid
  misc_feature (31)..(31): n stands for inosine
uuccuccccugaugaggccguuaggccgaanccuugaa

SEQ ID NO: 3931 - RNA, 38 nt, Artificial Sequence
  Description of Artificial Sequence:  Enzymatic Nucleic Acid
  misc_feature (31)..(31): n stands for inosine
gcgacgcacugaugaggccguuaggccgaanuuccucc

SEQ ID NO: 3932 - RNA, 38 nt, Artificial Sequence
  Description of Artificial Sequence:  Enzymatic Nucleic Acid
  misc_feature (31)..(31): n stands for inosine
aaagaguucugaugaggccguuaggccgaancgacgca

SEQ ID NO: 3933 - RNA, 38 nt, Artificial Sequence
  Description of Artificial Sequence:  Enzymatic Nucleic Acid
  misc_feature (31)..(31): n stands for inosine
ccccaaagcugaugaggccguuaggccgaanuuugcga

SEQ ID NO: 3934 - RNA, 38 nt, Artificial Sequence
  Description of Artificial Sequence:  Enzymatic Nucleic Acid
  misc_feature (31)..(31): n stands for inosine
gaccccaacugaugaggccguuaggccgaanaguuugc

SEQ ID NO: 3935 - RNA, 38 nt, Artificial Sequence
  Description of Artificial Sequence:  Enzymatic Nucleic Acid
  misc_feature (31)..(31): n stands for inosine
cagccgcacugaugaggccguuaggccgaanaccccaa

SEQ ID NO: 3936 - RNA, 38 nt, Artificial Sequence
  Description of Artificial Sequence:  Enzymatic Nucleic Acid
  misc_feature (31)..(31): n stands for inosine
gacacuuccugaugaggccguuaggccgaanccgcaag

SEQ ID NO: 3937 - RNA, 38 nt, Artificial Sequence
  Description of Artificial Sequence:  Enzymatic Nucleic Acid
  misc_feature (31)..(31): n stands for inosine
acaggcugcugaugaggccguuaggccgaanacacuuc

SEQ ID NO: 3938 - RNA, 38 nt, Artificial Sequence
  Description of Artificial Sequence:  Enzymatic Nucleic Acid
  misc_feature (31)..(31): n stands for inosine
aaacaggccugaugaggccguuaggccgaanugacacu

SEQ ID NO: 3939 - RNA, 38 nt, Artificial Sequence
  Description of Artificial Sequence:  Enzymatic Nucleic Acid
  misc_feature (31)..(31): n stands for inosine
cagaaacacugaugaggccguuaggccgaancugugac

SEQ ID NO: 3940 - RNA, 38 nt, Artificial Sequence
  Description of Artificial Sequence:  Enzymatic Nucleic Acid
  misc_feature (31)..(31): n stands for inosine
ccagaaaccugaugaggccguuaggccgaangcuguga

SEQ ID NO: 3941 - RNA, 38 nt, Artificial Sequence
  Description of Artificial Sequence:  Enzymatic Nucleic Acid
  misc_feature (31)..(31): n stands for inosine
gcaaaucccugaugaggccguuaggccgaanaaacagg

SEQ ID NO: 3942 - RNA, 38 nt, Artificial Sequence
  Description of Artificial Sequence:  Enzymatic Nucleic Acid
  misc_feature (31)..(31): n stands for inosine
uguucacccugaugaggccguuaggccgaancaaaucc

SEQ ID NO: 3943 - RNA, 38 nt, Artificial Sequence
  Description of Artificial Sequence:  Enzymatic Nucleic Acid
  misc_feature (31)..(31): n stands for inosine
cuggaggccugaugaggccguuaggccgaanuucaccu

SEQ ID NO: 3944 - RNA, 38 nt, Artificial Sequence
  Description of Artificial Sequence:  Enzymatic Nucleic Acid
  misc_feature (31)..(31): n stands for inosine
cgucuggacugaugaggccguuaggccgaancuguuca

SEQ ID NO: 3945 - RNA, 38 nt, Artificial Sequence
  Description of Artificial Sequence:  Enzymatic Nucleic Acid
  misc_feature (31)..(31): n stands for inosine
ccgucuggcugaugaggccguuaggccgaangcuguuc

SEQ ID NO: 3946 - RNA, 38 nt, Artificial Sequence
  Description of Artificial Sequence:  Enzymatic Nucleic Acid
  misc_feature (31)..(31): n stands for inosine
caccgucucugaugaggccguuaggccgaanaggcugu

SEQ ID NO: 3947 - RNA, 38 nt, Artificial Sequence
  Description of Artificial Sequence:  Enzymatic Nucleic Acid
  misc_feature (31)..(31): n stands for inosine
acaccguccugaugaggccguuaggccgaangaggcug

SEQ ID NO: 3948 - RNA, 38 nt, Artificial Sequence
  Description of Artificial Sequence:  Enzymatic Nucleic Acid
  misc_feature (31)..(31): n stands for inosine
gauguuggcugaugaggccguuaggccgaancacaccg

SEQ ID NO: 3949 - RNA, 38 nt, Artificial Sequence
  Description of Artificial Sequence:  Enzymatic Nucleic Acid
  misc_feature (31)..(31): n stands for inosine
uagauguucugaugaggccguuaggccgaanugcacac

SEQ ID NO: 3950 - RNA, 38 nt, Artificial Sequence
  Description of Artificial Sequence:  Enzymatic Nucleic Acid
  misc_feature (31)..(31): n stands for inosine
guagaugucugaugaggccguuaggccgaangugcaca

SEQ ID NO: 3951 - RNA, 38 nt, Artificial Sequence
  Description of Artificial Sequence:  Enzymatic Nucleic Acid
  misc_feature (31)..(31): n stands for inosine
cuuguagacugaugaggccguuaggccgaanuuggugc

SEQ ID NO: 3952 - RNA, 38 nt, Artificial Sequence
  Description of Artificial Sequence:  Enzymatic Nucleic Acid
  misc_feature (31)..(31): n stands for inosine
gaucuugucugaugaggccguuaggccgaanauguugg

SEQ ID NO: 3953 - RNA, 38 nt, Artificial Sequence
  Description of Artificial Sequence:  Enzymatic Nucleic Acid
  misc_feature (31)..(31): n stands for inosine
gaggaucucugaugaggccguuaggccgaanuagaugu

SEQ ID NO: 3954 - RNA, 38 nt, Artificial Sequence
  Description of Artificial Sequence:  Enzymatic Nucleic Acid
  misc_feature (31)..(31): n stands for inosine
cagcaggacugaugaggccguuaggccgaanaucuugu

SEQ ID NO: 3955 - RNA, 38 nt, Artificial Sequence
  Description of Artificial Sequence:  Enzymatic Nucleic Acid
  misc_feature (31)..(31): n stands for inosine
gcagcaggcugaugaggccguuaggccgaangaucuug

SEQ ID NO: 3956 - RNA, 38 nt, Artificial Sequence
  Description of Artificial Sequence:  Enzymatic Nucleic Acid
  misc_feature (31)..(31): n stands for inosine
cugcagcacugaugaggccguuaggccgaanaggaucu

SEQ ID NO: 3957 - RNA, 38 nt, Artificial Sequence
  Description of Artificial Sequence:  Enzymatic Nucleic Acid
  misc_feature (31)..(31): n stands for inosine
ccugcagccugaugaggccguuaggccgaangaggauc

SEQ ID NO: 3958 - RNA, 38 nt, Artificial Sequence
  Description of Artificial Sequence:  Enzymatic Nucleic Acid
  misc_feature (31)..(31): n stands for inosine
acgccugccugaugaggccguuaggccgaancaggagg

SEQ ID NO: 3959 - RNA, 38 nt, Artificial Sequence
  Description of Artificial Sequence:  Enzymatic Nucleic Acid
  misc_feature (31)..(31): n stands for inosine
uguacgcccugaugaggccguuaggccgaancagcagg

SEQ ID NO: 3960 - RNA, 38 nt, Artificial Sequence
  Description of Artificial Sequence:  Enzymatic Nucleic Acid
  misc_feature (31)..(31): n stands for inosine
gugaaacccugaugaggccguuaggccgaanuacgccu

SEQ ID NO: 3961 - RNA, 38 nt, Artificial Sequence
  Description of Artificial Sequence:  Enzymatic Nucleic Acid
  misc_feature (31)..(31): n stands for inosine
cacaugcgcugaugaggccguuaggccgaanaaaccug

SEQ ID NO: 3962 - RNA, 38 nt, Artificial Sequence
  Description of Artificial Sequence:  Enzymatic Nucleic Acid
  misc_feature (31)..(31): n stands for inosine
agcacacacugaugaggccguuaggccgaancgugaaa

SEQ ID NO: 3963 - RNA, 38 nt, Artificial Sequence
  Description of Artificial Sequence:  Enzymatic Nucleic Acid
  misc_feature (31)..(31): n stands for inosine
ggagcugccugaugaggccguuaggccgaancacacau

SEQ ID NO: 3964 - RNA, 38 nt, Artificial Sequence
  Description of Artificial Sequence:  Enzymatic Nucleic Acid
  misc_feature (31)..(31): n stands for inosine
augggagccugaugaggccguuaggccgaancagcaca

SEQ ID NO: 3965 - RNA, 38 nt, Artificial Sequence
  Description of Artificial Sequence:  Enzymatic Nucleic Acid
  misc_feature (31)..(31): n stands for inosine
gaaaugggcugaugaggccguuaggccgaancugcagc

SEQ ID NO: 3966 - RNA, 38 nt, Artificial Sequence
  Description of Artificial Sequence:  Enzymatic Nucleic Acid
  misc_feature (31)..(31): n stands for inosine
augaaaugcugaugaggccguuaggccgaanagcugca

SEQ ID NO: 3967 - RNA, 38 nt, Artificial Sequence
  Description of Artificial Sequence:  Enzymatic Nucleic Acid
  misc_feature (31)..(31): n stands for inosine
gaugaaaucugaugaggccguuaggccgaangagcugc

SEQ ID NO: 3968 - RNA, 38 nt, Artificial Sequence
  Description of Artificial Sequence:  Enzymatic Nucleic Acid
  misc_feature (31)..(31): n stands for inosine
ugaugaaacugaugaggccguuaggccgaanggagcug

SEQ ID NO: 3969 - RNA, 38 nt, Artificial Sequence
  Description of Artificial Sequence:  Enzymatic Nucleic Acid
  misc_feature (31)..(31): n stands for inosine
cuugcugacugaugaggccguuaggccgaanaaauggg

SEQ ID NO: 3970 - RNA, 38 nt, Artificial Sequence
  Description of Artificial Sequence:  Enzymatic Nucleic Acid
  misc_feature (31)..(31): n stands for inosine
aaacuugccugaugaggccguuaggccgaanaugaaau

SEQ ID NO: 3971 - RNA, 38 nt, Artificial Sequence
  Description of Artificial Sequence:  Enzymatic Nucleic Acid
  misc_feature (31)..(31): n stands for inosine
uccaaacucugaugaggccguuaggccgaancugauga

SEQ ID NO: 3972 - RNA, 38 nt, Artificial Sequence
  Description of Artificial Sequence:  Enzymatic Nucleic Acid
  misc_feature (31)..(31): n stands for inosine
aaauguggcugaugaggccguuaggccgaanuucuucc

SEQ ID NO: 3973 - RNA, 38 nt, Artificial Sequence
  Description of Artificial Sequence:  Enzymatic Nucleic Acid
  misc_feature (31)..(31): n stands for inosine
aaaaugugcugaugaggccguuaggccgaanguucuuc

SEQ ID NO: 3974 - RNA, 38 nt, Artificial Sequence
  Description of Artificial Sequence:  Enzymatic Nucleic Acid
  misc_feature (31)..(31): n stands for inosine
aaaaaugucugaugaggccguuaggccgaangguucuu

SEQ ID NO: 3975 - RNA, 38 nt, Artificial Sequence
  Description of Artificial Sequence:  Enzymatic Nucleic Acid
  misc_feature (31)..(31): n stands for inosine
gaaaaaugcugaugaggccguuaggccgaanggguucu

SEQ ID NO: 3976 - RNA, 38 nt, Artificial Sequence
  Description of Artificial Sequence:  Enzymatic Nucleic Acid
  misc_feature (31)..(31): n stands for inosine
aggaaaaacugaugaggccguuaggccgaanugggguu

SEQ ID NO: 3977 - RNA, 38 nt, Artificial Sequence
  Description of Artificial Sequence:  Enzymatic Nucleic Acid
  misc_feature (31)..(31): n stands for inosine
gacgcgcacugaugaggccguuaggccgaanaaaaaug

SEQ ID NO: 3978 - RNA, 38 nt, Artificial Sequence
  Description of Artificial Sequence:  Enzymatic Nucleic Acid
  misc_feature (31)..(31): n stands for inosine
ugacgcgccugaugaggccguuaggccgaangaaaaau

SEQ ID NO: 3979 - RNA, 38 nt, Artificial Sequence
  Description of Artificial Sequence:  Enzymatic Nucleic Acid
  misc_feature (31)..(31): n stands for inosine
gucagagacugaugaggccguuaggccgaanacgcgca

SEQ ID NO: 3980 - RNA, 38 nt, Artificial Sequence
  Description of Artificial Sequence:  Enzymatic Nucleic Acid
  misc_feature (31)..(31): n stands for inosine
cgugucagcugaugaggccguuaggccgaanaugacgc

SEQ ID NO: 3981 - RNA, 38 nt, Artificial Sequence
  Description of Artificial Sequence:  Enzymatic Nucleic Acid
  misc_feature (31)..(31): n stands for inosine
gccguguccugaugaggccguuaggccgaanagaugac

SEQ ID NO: 3982 - RNA, 38 nt, Artificial Sequence
  Description of Artificial Sequence:  Enzymatic Nucleic Acid
  misc_feature (31)..(31): n stands for inosine
ggaggccgcugaugaggccguuaggccgaanucagaga

SEQ ID NO: 3983 - RNA, 38 nt, Artificial Sequence
  Description of Artificial Sequence:  Enzymatic Nucleic Acid
  misc_feature (31)..(31): n stands for inosine
cagagggacugaugaggccguuaggccgaanccguguc

SEQ ID NO: 3984 - RNA, 38 nt, Artificial Sequence
  Description of Artificial Sequence:  Enzymatic Nucleic Acid
  misc_feature (31)..(31): n stands for inosine
gcagagggcugaugaggccguuaggccgaangccgugu

SEQ ID NO: 3985 - RNA, 38 nt, Artificial Sequence
  Description of Artificial Sequence:  Enzymatic Nucleic Acid
  misc_feature (31)..(31): n stands for inosine
uagcagagcugaugaggccguuaggccgaanaggccgu

SEQ ID NO: 3986 - RNA, 38 nt, Artificial Sequence
  Description of Artificial Sequence:  Enzymatic Nucleic Acid
  misc_feature (31)..(31): n stands for inosine
guagcagacugaugaggccguuaggccgaangaggccg

SEQ ID NO: 3987 - RNA, 38 nt, Artificial Sequence
  Description of Artificial Sequence:  Enzymatic Nucleic Acid
  misc_feature (31)..(31): n stands for inosine
aguagcagcugaugaggccguuaggccgaanggaggcc

SEQ ID NO: 3988 - RNA, 38 nt, Artificial Sequence
  Description of Artificial Sequence:  Enzymatic Nucleic Acid
  misc_feature (31)..(31): n stands for inosine
ggaguagccugaugaggccguuaggccgaanagggagg

SEQ ID NO: 3989 - RNA, 38 nt, Artificial Sequence
  Description of Artificial Sequence:  Enzymatic Nucleic Acid
  misc_feature (31)..(31): n stands for inosine
gauggagucugaugaggccguuaggccgaancagaggg

SEQ ID NO: 3990 - RNA, 38 nt, Artificial Sequence
  Description of Artificial Sequence:  Enzymatic Nucleic Acid
  misc_feature (31)..(31): n stands for inosine
caggauggcugaugaggccguuaggccgaanuagcaga

SEQ ID NO: 3991 - RNA, 38 nt, Artificial Sequence
  Description of Artificial Sequence:  Enzymatic Nucleic Acid
  misc_feature (31)..(31): n stands for inosine
uucaggaucugaugaggccguuaggccgaanaguagca

SEQ ID NO: 3992 - RNA, 38 nt, Artificial Sequence
  Description of Artificial Sequence:  Enzymatic Nucleic Acid
  misc_feature (31)..(31): n stands for inosine
uuucaggacugaugaggccguuaggccgaangaguagc

SEQ ID NO: 3993 - RNA, 38 nt, Artificial Sequence
  Description of Artificial Sequence:  Enzymatic Nucleic Acid
  misc_feature (31)..(31): n stands for inosine
ggcuuucacugaugaggccguuaggccgaanauggagu

SEQ ID NO: 3994 - RNA, 38 nt, Artificial Sequence
  Description of Artificial Sequence:  Enzymatic Nucleic Acid
  misc_feature (31)..(31): n stands for inosine
uggcuuuccugaugaggccguuaggccgaangauggag

SEQ ID NO: 3995 - RNA, 38 nt, Artificial Sequence
  Description of Artificial Sequence:  Enzymatic Nucleic Acid
  misc_feature (31)..(31): n stands for inosine
gcguucuucugaugaggccguuaggccgaancuuucag

SEQ ID NO: 3996 - RNA, 38 nt, Artificial Sequence
  Description of Artificial Sequence:  Enzymatic Nucleic Acid
  misc_feature (31)..(31): n stands for inosine
ugcguucucugaugaggccguuaggccgaangcuuuca

SEQ ID NO: 3997 - RNA, 38 nt, Artificial Sequence
  Description of Artificial Sequence:  Enzymatic Nucleic Acid
  misc_feature (31)..(31): n stands for inosine
gacauccccugaugaggccguuaggccgaancguucuu

SEQ ID NO: 3998 - RNA, 38 nt, Artificial Sequence
  Description of Artificial Sequence:  Enzymatic Nucleic Acid
  misc_feature (31)..(31): n stands for inosine
uggccccccugaugaggccguuaggccgaancgacauc

SEQ ID NO: 3999 - RNA, 38 nt, Artificial Sequence
  Description of Artificial Sequence:  Enzymatic Nucleic Acid
  misc_feature (31)..(31): n stands for inosine
gcgcccuucugaugaggccguuaggccgaancccccag

SEQ ID NO: 4000 - RNA, 38 nt, Artificial Sequence
  Description of Artificial Sequence:  Enzymatic Nucleic Acid
  misc_feature (31)..(31): n stands for inosine
ggcgcccucugaugaggccguuaggccgaangccccca

SEQ ID NO: 4001 - RNA, 38 nt, Artificial Sequence
  Description of Artificial Sequence:  Enzymatic Nucleic Acid
  misc_feature (31)..(31): n stands for inosine
gggccggccugaugaggccguuaggccgaancgcccuu

SEQ ID NO: 4002 - RNA, 38 nt, Artificial Sequence
  Description of Artificial Sequence:  Enzymatic Nucleic Acid
  misc_feature (31)..(31): n stands for inosine
agagggcccugaugaggccguuaggccgaancggcgcc

SEQ ID NO: 4003 - RNA, 38 nt, Artificial Sequence
  Description of Artificial Sequence:  Enzymatic Nucleic Acid
  misc_feature (31)..(31): n stands for inosine
gggcagagcugaugaggccguuaggccgaanccggcgg

SEQ ID NO: 4004 - RNA, 38 nt, Artificial Sequence
  Description of Artificial Sequence:  Enzymatic Nucleic Acid
  misc_feature (31)..(31): n stands for inosine
agggcagacugaugaggccguuaggccgaangccggcg

SEQ ID NO: 4005 - RNA, 38 nt, Artificial Sequence
  Description of Artificial Sequence:  Enzymatic Nucleic Acid
  misc_feature (31)..(31): n stands for inosine
gagggcagcugaugaggccguuaggccgaanggccggc

SEQ ID NO: 4006 - RNA, 38 nt, Artificial Sequence
  Description of Artificial Sequence:  Enzymatic Nucleic Acid
  misc_feature (31)..(31): n stands for inosine
cggagggccugaugaggccguuaggccgaanagggccg

SEQ ID NO: 4007 - RNA, 38 nt, Artificial Sequence
  Description of Artificial Sequence:  Enzymatic Nucleic Acid
  misc_feature (31)..(31): n stands for inosine
ccucggagcugaugaggccguuaggccgaancagaggg

SEQ ID NO: 4008 - RNA, 38 nt, Artificial Sequence
  Description of Artificial Sequence:  Enzymatic Nucleic Acid
  misc_feature (31)..(31): n stands for inosine
gccucggacugaugaggccguuaggccgaangcagagg

SEQ ID NO: 4009 - RNA, 38 nt, Artificial Sequence
  Description of Artificial Sequence:  Enzymatic Nucleic Acid
  misc_feature (31)..(31): n stands for inosine
ggccucggcugaugaggccguuaggccgaanggcagag

SEQ ID NO: 4010 - RNA, 38 nt, Artificial Sequence
  Description of Artificial Sequence:  Enzymatic Nucleic Acid
  misc_feature (31)..(31): n stands for inosine
acggccuccugaugaggccguuaggccgaanagggcag

SEQ ID NO: 4011 - RNA, 38 nt, Artificial Sequence
  Description of Artificial Sequence:  Enzymatic Nucleic Acid
  misc_feature (31)..(31): n stands for inosine
cacugcaccugaugaggccguuaggccgaanccucgga

SEQ ID NO: 4012 - RNA, 38 nt, Artificial Sequence
  Description of Artificial Sequence:  Enzymatic Nucleic Acid
  misc_feature (31)..(31): n stands for inosine
acagccaccugaugaggccguuaggccgaancacggcc

SEQ ID NO: 4013 - RNA, 38 nt, Artificial Sequence
  Description of Artificial Sequence:  Enzymatic Nucleic Acid
  misc_feature (31)..(31): n stands for inosine
gguggcaccugaugaggccguuaggccgaanccacugc

SEQ ID NO: 4014 - RNA, 38 nt, Artificial Sequence
  Description of Artificial Sequence:  Enzymatic Nucleic Acid
  misc_feature (31)..(31): n stands for inosine
ugcuuggucugaugaggccguuaggccgaancacagcc

SEQ ID NO: 4015 - RNA, 38 nt, Artificial Sequence
  Description of Artificial Sequence:  Enzymatic Nucleic Acid
  misc_feature (31)..(31): n stands for inosine
augcuuggcugaugaggccguuaggccgaangcacagc

SEQ ID NO: 4016 - RNA, 38 nt, Artificial Sequence
  Description of Artificial Sequence:  Enzymatic Nucleic Acid
  misc_feature (31)..(31): n stands for inosine
gaaugcuucugaugaggccguuaggccgaanuggcaca

SEQ ID NO: 4017 - RNA, 38 nt, Artificial Sequence
  Description of Artificial Sequence:  Enzymatic Nucleic Acid
  misc_feature (31)..(31): n stands for inosine
ggaaugcucugaugaggccguuaggccgaanguggcac

SEQ ID NO: 4018 - RNA, 38 nt, Artificial Sequence
  Description of Artificial Sequence:  Enzymatic Nucleic Acid
  misc_feature (31)..(31): n stands for inosine
agcaggaacugaugaggccguuaggccgaancuuggug

SEQ ID NO: 4019 - RNA, 38 nt, Artificial Sequence
  Description of Artificial Sequence:  Enzymatic Nucleic Acid
  misc_feature (31)..(31): n stands for inosine
cuugagcacugaugaggccguuaggccgaanaaugcuu

SEQ ID NO: 4020 - RNA, 38 nt, Artificial Sequence
  Description of Artificial Sequence:  Enzymatic Nucleic Acid
  misc_feature (31)..(31): n stands for inosine
gcuugagccugaugaggccguuaggccgaangaaugcu

SEQ ID NO: 4021 - RNA, 38 nt, Artificial Sequence
  Description of Artificial Sequence:  Enzymatic Nucleic Acid
  misc_feature (31)..(31): n stands for inosine
ucagcuugcugaugaggccguuaggccgaancaggaau

SEQ ID NO: 4022 - RNA, 38 nt, Artificial Sequence
  Description of Artificial Sequence:  Enzymatic Nucleic Acid
  misc_feature (31)..(31): n stands for inosine
agucagcucugaugaggccguuaggccgaanagcagga

SEQ ID NO: 4023 - RNA, 38 nt, Artificial Sequence
  Description of Artificial Sequence:  Enzymatic Nucleic Acid
  misc_feature (31)..(31): n stands for inosine
gucgaguccugaugaggccguuaggccgaancuugagc

SEQ ID NO: 4024 - RNA, 38 nt, Artificial Sequence
  Description of Artificial Sequence:  Enzymatic Nucleic Acid
  misc_feature (31)..(31): n stands for inosine
cggugucgcugaugaggccguuaggccgaanucagcuu

SEQ ID NO: 4025 - RNA, 38 nt, Artificial Sequence
  Description of Artificial Sequence:  Enzymatic Nucleic Acid
  misc_feature (31)..(31): n stands for inosine
ugacacggcugaugaggccguuaggccgaanucgaguc

SEQ ID NO: 4026 - RNA, 38 nt, Artificial Sequence
  Description of Artificial Sequence:  Enzymatic Nucleic Acid
  misc_feature (31)..(31): n stands for inosine
ggugacaccugaugaggccguuaggccgaanugucgag

SEQ ID NO: 4027 - RNA, 38 nt, Artificial Sequence
  Description of Artificial Sequence:  Enzymatic Nucleic Acid
  misc_feature (31)..(31): n stands for inosine
cacguaggcugaugaggccguuaggccgaanacacggu

SEQ ID NO: 4028 - RNA, 38 nt, Artificial Sequence
  Description of Artificial Sequence:  Enzymatic Nucleic Acid
  misc_feature (31)..(31): n stands for inosine
ggcacguacugaugaggccguuaggccgaanugacacg

SEQ ID NO: 4029 - RNA, 38 nt, Artificial Sequence
  Description of Artificial Sequence:  Enzymatic Nucleic Acid
  misc_feature (31)..(31): n stands for inosine
uggcacgucugaugaggccguuaggccgaangugacac

SEQ ID NO: 4030 - RNA, 38 nt, Artificial Sequence
  Description of Artificial Sequence:  Enzymatic Nucleic Acid
  misc_feature (31)..(31): n stands for inosine
ccaggagucugaugaggccguuaggccgaancacguag

SEQ ID NO: 4031 - RNA, 38 nt, Artificial Sequence
  Description of Artificial Sequence:  Enzymatic Nucleic Acid
  misc_feature (31)..(31): n stands for inosine
cccaggagcugaugaggccguuaggccgaangcacgua

SEQ ID NO: 4032 - RNA, 38 nt, Artificial Sequence
  Description of Artificial Sequence:  Enzymatic Nucleic Acid
  misc_feature (31)..(31): n stands for inosine
accccaggcugaugaggccguuaggccgaanuggcacg

SEQ ID NO: 4033 - RNA, 38 nt, Artificial Sequence
  Description of Artificial Sequence:  Enzymatic Nucleic Acid
  misc_feature (31)..(31): n stands for inosine
ugaccccacugaugaggccguuaggccgaanaguggca

SEQ ID NO: 4034 - RNA, 38 nt, Artificial Sequence
  Description of Artificial Sequence:  Enzymatic Nucleic Acid
  misc_feature (31)..(31): n stands for inosine
gugacccccugaugaggccguuaggccgaangaguggc

SEQ ID NO: 4035 - RNA, 38 nt, Artificial Sequence
  Description of Artificial Sequence:  Enzymatic Nucleic Acid
  misc_feature (31)..(31): n stands for inosine
guccugagcugaugaggccguuaggccgaanaccccag

SEQ ID NO: 4036 - RNA, 38 nt, Artificial Sequence
  Description of Artificial Sequence:  Enzymatic Nucleic Acid
  misc_feature (31)..(31): n stands for inosine
cuguccugcugaugaggccguuaggccgaanugacccc

SEQ ID NO: 4037 - RNA, 38 nt, Artificial Sequence
  Description of Artificial Sequence:  Enzymatic Nucleic Acid
  misc_feature (31)..(31): n stands for inosine
ggcugucccugaugaggccguuaggccgaanagugacc

SEQ ID NO: 4038 - RNA, 38 nt, Artificial Sequence
  Description of Artificial Sequence:  Enzymatic Nucleic Acid
  misc_feature (31)..(31): n stands for inosine
gucugggccugaugaggccguuaggccgaanuccugag

SEQ ID NO: 4039 - RNA, 38 nt, Artificial Sequence
  Description of Artificial Sequence:  Enzymatic Nucleic Acid
  misc_feature (31)..(31): n stands for inosine
ugcgucugcugaugaggccguuaggccgaancuguccu

SEQ ID NO: 4040 - RNA, 38 nt, Artificial Sequence
  Description of Artificial Sequence:  Enzymatic Nucleic Acid
  misc_feature (31)..(31): n stands for inosine
cugcgucucugaugaggccguuaggccgaangcugucc

SEQ ID NO: 4041 - RNA, 38 nt, Artificial Sequence
  Description of Artificial Sequence:  Enzymatic Nucleic Acid
  misc_feature (31)..(31): n stands for inosine
gcugcguccugaugaggccguuaggccgaanggcuguc

SEQ ID NO: 4042 - RNA, 38 nt, Artificial Sequence
  Description of Artificial Sequence:  Enzymatic Nucleic Acid
  misc_feature (31)..(31): n stands for inosine
gacucagccugaugaggccguuaggccgaancgucugg

SEQ ID NO: 4043 - RNA, 38 nt, Artificial Sequence
  Description of Artificial Sequence:  Enzymatic Nucleic Acid
  misc_feature (31)..(31): n stands for inosine
uccgacuccugaugaggccguuaggccgaancugcguc

SEQ ID NO: 4044 - RNA, 38 nt, Artificial Sequence
  Description of Artificial Sequence:  Enzymatic Nucleic Acid
  misc_feature (31)..(31): n stands for inosine
uccccgggcugaugaggccguuaggccgaancuuccga

SEQ ID NO: 4045 - RNA, 38 nt, Artificial Sequence
  Description of Artificial Sequence:  Enzymatic Nucleic Acid
  misc_feature (31)..(31): n stands for inosine
cguccccgcugaugaggccguuaggccgaanagcuucc

SEQ ID NO: 4046 - RNA, 38 nt, Artificial Sequence
  Description of Artificial Sequence:  Enzymatic Nucleic Acid
  misc_feature (31)..(31): n stands for inosine
ucgucccccugaugaggccguuaggccgaangagcuuc

SEQ ID NO: 4047 - RNA, 38 nt, Artificial Sequence
  Description of Artificial Sequence:  Enzymatic Nucleic Acid
  misc_feature (31)..(31): n stands for inosine
gggcaguccugaugaggccguuaggccgaancgucguc

SEQ ID NO: 4048 - RNA, 38 nt, Artificial Sequence
  Description of Artificial Sequence:  Enzymatic Nucleic Acid
  misc_feature (31)..(31): n stands for inosine
uccagggccugaugaggccguuaggccgaanucagcgu

SEQ ID NO: 4049 - RNA, 38 nt, Artificial Sequence
  Description of Artificial Sequence:  Enzymatic Nucleic Acid
  misc_feature (31)..(31): n stands for inosine
gccuccagcugaugaggccguuaggccgaancagucag

SEQ ID NO: 4050 - RNA, 38 nt, Artificial Sequence
  Description of Artificial Sequence:  Enzymatic Nucleic Acid
  misc_feature (31)..(31): n stands for inosine
ggccuccacugaugaggccguuaggccgaangcaguca

SEQ ID NO: 4051 - RNA, 38 nt, Artificial Sequence
  Description of Artificial Sequence:  Enzymatic Nucleic Acid
  misc_feature (31)..(31): n stands for inosine
cggccucccugaugaggccguuaggccgaanggcaguc

SEQ ID NO: 4052 - RNA, 38 nt, Artificial Sequence
  Description of Artificial Sequence:  Enzymatic Nucleic Acid
  misc_feature (31)..(31): n stands for inosine
uuggcugccugaugaggccguuaggccgaanccuccag

SEQ ID NO: 4053 - RNA, 38 nt, Artificial Sequence
  Description of Artificial Sequence:  Enzymatic Nucleic Acid
  misc_feature (31)..(31): n stands for inosine
ggguuggccugaugaggccguuaggccgaancggccuc

SEQ ID NO: 4054 - RNA, 38 nt, Artificial Sequence
  Description of Artificial Sequence:  Enzymatic Nucleic Acid
  misc_feature (31)..(31): n stands for inosine
gccggguucugaugaggccguuaggccgaancugcggc

SEQ ID NO: 4055 - RNA, 38 nt, Artificial Sequence
  Description of Artificial Sequence:  Enzymatic Nucleic Acid
  misc_feature (31)..(31): n stands for inosine
ugccgggucugaugaggccguuaggccgaangcugcgg

SEQ ID NO: 4056 - RNA, 38 nt, Artificial Sequence
  Description of Artificial Sequence:  Enzymatic Nucleic Acid
  misc_feature (31)..(31): n stands for inosine
cagugccgcugaugaggccguuaggccgaanuuggcug

SEQ ID NO: 4057 - RNA, 38 nt, Artificial Sequence
  Description of Artificial Sequence:  Enzymatic Nucleic Acid
  misc_feature (31)..(31): n stands for inosine
gcagugcccugaugaggccguuaggccgaanguuggcu

SEQ ID NO: 4058 - RNA, 38 nt, Artificial Sequence
  Description of Artificial Sequence:  Enzymatic Nucleic Acid
  misc_feature (31)..(31): n stands for inosine
gagggcagcugaugaggccguuaggccgaanccggguu

SEQ ID NO: 4059 - RNA, 38 nt, Artificial Sequence
  Description of Artificial Sequence:  Enzymatic Nucleic Acid
  misc_feature (31)..(31): n stands for inosine
cugagggccugaugaggccguuaggccgaanugccggg

SEQ ID NO: 4060 - RNA, 38 nt, Artificial Sequence
  Description of Artificial Sequence:  Enzymatic Nucleic Acid
  misc_feature (31)..(31): n stands for inosine
agucugagcugaugaggccguuaggccgaancagugcc

SEQ ID NO: 4061 - RNA, 38 nt, Artificial Sequence
  Description of Artificial Sequence:  Enzymatic Nucleic Acid
  misc_feature (31)..(31): n stands for inosine
aagucugacugaugaggccguuaggccgaangcagugc

SEQ ID NO: 4062 - RNA, 38 nt, Artificial Sequence
  Description of Artificial Sequence:  Enzymatic Nucleic Acid
  misc_feature (31)..(31): n stands for inosine
gaagucugcugaugaggccguuaggccgaanggcagug

SEQ ID NO: 4063 - RNA, 38 nt, Artificial Sequence
  Description of Artificial Sequence:  Enzymatic Nucleic Acid
  misc_feature (31)..(31): n stands for inosine
uugaaguccugaugaggccguuaggccgaanagggcag

SEQ ID NO: 4064 - RNA, 38 nt, Artificial Sequence
  Description of Artificial Sequence:  Enzymatic Nucleic Acid
  misc_feature (31)..(31): n stands for inosine
ggucuugacugaugaggccguuaggccgaanucugagg

SEQ ID NO: 4065 - RNA, 38 nt, Artificial Sequence
  Description of Artificial Sequence:  Enzymatic Nucleic Acid
  misc_feature (31)..(31): n stands for inosine
gauggucucugaugaggccguuaggccgaanaagucug

SEQ ID NO: 4066 - RNA, 38 nt, Artificial Sequence
  Description of Artificial Sequence:  Enzymatic Nucleic Acid
  misc_feature (31)..(31): n stands for inosine
uccaggaucugaugaggccguuaggccgaanucuugaa

SEQ ID NO: 4067 - RNA, 38 nt, Artificial Sequence
  Description of Artificial Sequence:  Enzymatic Nucleic Acid
  misc_feature (31)..(31): n stands for inosine
guccaggacugaugaggccguuaggccgaangucuuga

SEQ ID NO: 4068 - RNA, 38 nt, Artificial Sequence
  Description of Artificial Sequence:  Enzymatic Nucleic Acid
  misc_feature (31)..(31): n stands for inosine
ucaguccacugaugaggccguuaggccgaanauggucu

SEQ ID NO: 4069 - RNA, 38 nt, Artificial Sequence
  Description of Artificial Sequence:  Enzymatic Nucleic Acid
  misc_feature (31)..(31): n stands for inosine
aucagucccugaugaggccguuaggccgaangaugguc

SEQ ID NO: 4070 - RNA, 38 nt, Artificial Sequence
  Description of Artificial Sequence:  Enzymatic Nucleic Acid
  misc_feature (31)..(31): n stands for inosine
uggccauccugaugaggccguuaggccgaanuccagga

SEQ ID NO: 4071 - RNA, 38 nt, Artificial Sequence
  Description of Artificial Sequence:  Enzymatic Nucleic Acid
  misc_feature (31)..(31): n stands for inosine
gggcgggucugaugaggccguuaggccgaanccaucag

SEQ ID NO: 4072 - RNA, 38 nt, Artificial Sequence
  Description of Artificial Sequence:  Enzymatic Nucleic Acid
  misc_feature (31)..(31): n stands for inosine
ugggcgggcugaugaggccguuaggccgaangccauca

SEQ ID NO: 4073 - RNA, 38 nt, Artificial Sequence
  Description of Artificial Sequence:  Enzymatic Nucleic Acid
  misc_feature (31)..(31): n stands for inosine
ugugggcgcugaugaggccguuaggccgaanuggccau

SEQ ID NO: 4074 - RNA, 38 nt, Artificial Sequence
  Description of Artificial Sequence:  Enzymatic Nucleic Acid
  misc_feature (31)..(31): n stands for inosine
cugugggccugaugaggccguuaggccgaanguggcca

SEQ ID NO: 4075 - RNA, 38 nt, Artificial Sequence
  Description of Artificial Sequence:  Enzymatic Nucleic Acid
  misc_feature (31)..(31): n stands for inosine
uggcugugcugaugaggccguuaggccgaancgggugg

SEQ ID NO: 4076 - RNA, 38 nt, Artificial Sequence
  Description of Artificial Sequence:  Enzymatic Nucleic Acid
  misc_feature (31)..(31): n stands for inosine
cuggcugucugaugaggccguuaggccgaangcgggug

SEQ ID NO: 4077 - RNA, 38 nt, Artificial Sequence
  Description of Artificial Sequence:  Enzymatic Nucleic Acid
  misc_feature (31)..(31): n stands for inosine
ccuggcugcugaugaggccguuaggccgaanggcgggu

SEQ ID NO: 4078 - RNA, 38 nt, Artificial Sequence
  Description of Artificial Sequence:  Enzymatic Nucleic Acid
  misc_feature (31)..(31): n stands for inosine
ggccuggccugaugaggccguuaggccgaanugggcgg

SEQ ID NO: 4079 - RNA, 38 nt, Artificial Sequence
  Description of Artificial Sequence:  Enzymatic Nucleic Acid
  misc_feature (31)..(31): n stands for inosine
cucggccucugaugaggccguuaggccgaancuguggg

SEQ ID NO: 4080 - RNA, 38 nt, Artificial Sequence
  Description of Artificial Sequence:  Enzymatic Nucleic Acid
  misc_feature (31)..(31): n stands for inosine
ucucggcccugaugaggccguuaggccgaangcugugg

SEQ ID NO: 4081 - RNA, 38 nt, Artificial Sequence
  Description of Artificial Sequence:  Enzymatic Nucleic Acid
  misc_feature (31)..(31): n stands for inosine
cugcucuccugaugaggccguuaggccgaanccuggcu

SEQ ID NO: 4082 - RNA, 38 nt, Artificial Sequence
  Description of Artificial Sequence:  Enzymatic Nucleic Acid
  misc_feature (31)..(31): n stands for inosine
cugguguccugaugaggccguuaggccgaancucucgg

SEQ ID NO: 4083 - RNA, 38 nt, Artificial Sequence
  Description of Artificial Sequence:  Enzymatic Nucleic Acid
  misc_feature (31)..(31): n stands for inosine
gcugcuggcugaugaggccguuaggccgaanucugcuc

SEQ ID NO: 4084 - RNA, 38 nt, Artificial Sequence
  Description of Artificial Sequence:  Enzymatic Nucleic Acid
  misc_feature (31)..(31): n stands for inosine
gggcugcucugaugaggccguuaggccgaanugucugc

SEQ ID NO: 4085 - RNA, 38 nt, Artificial Sequence
  Description of Artificial Sequence:  Enzymatic Nucleic Acid
  misc_feature (31)..(31): n stands for inosine
agggcugccugaugaggccguuaggccgaangugucug

SEQ ID NO: 4086 - RNA, 38 nt, Artificial Sequence
  Description of Artificial Sequence:  Enzymatic Nucleic Acid
  misc_feature (31)..(31): n stands for inosine
gacagggccugaugaggccguuaggccgaancuggugu

SEQ ID NO: 4087 - RNA, 38 nt, Artificial Sequence
  Description of Artificial Sequence:  Enzymatic Nucleic Acid
  misc_feature (31)..(31): n stands for inosine
cgugacagcugaugaggccguuaggccgaancugcugg

SEQ ID NO: 4088 - RNA, 38 nt, Artificial Sequence
  Description of Artificial Sequence:  Enzymatic Nucleic Acid
  misc_feature (31)..(31): n stands for inosine
gcgugacacugaugaggccguuaggccgaangcugcug

SEQ ID NO: 4089 - RNA, 38 nt, Artificial Sequence
  Description of Artificial Sequence:  Enzymatic Nucleic Acid
  misc_feature (31)..(31): n stands for inosine
ggcgugaccugaugaggccguuaggccgaanggcugcu

SEQ ID NO: 4090 - RNA, 38 nt, Artificial Sequence
  Description of Artificial Sequence:  Enzymatic Nucleic Acid
  misc_feature (31)..(31): n stands for inosine
gcccggcgcugaugaggccguuaggccgaanacagggc

SEQ ID NO: 4091 - RNA, 38 nt, Artificial Sequence
  Description of Artificial Sequence:  Enzymatic Nucleic Acid
  misc_feature (31)..(31): n stands for inosine
uagagccccugaugaggccguuaggccgaancgugaca

SEQ ID NO: 4092 - RNA, 38 nt, Artificial Sequence
  Description of Artificial Sequence:  Enzymatic Nucleic Acid
  misc_feature (31)..(31): n stands for inosine
ggacguagcugaugaggccguuaggccgaancccggcg

SEQ ID NO: 4093 - RNA, 38 nt, Artificial Sequence
  Description of Artificial Sequence:  Enzymatic Nucleic Acid
  misc_feature (31)..(31): n stands for inosine
ugggacgucugaugaggccguuaggccgaanagcccgg

SEQ ID NO: 4094 - RNA, 38 nt, Artificial Sequence
  Description of Artificial Sequence:  Enzymatic Nucleic Acid
  misc_feature (31)..(31): n stands for inosine
ccucccugcugaugaggccguuaggccgaanacguaga

SEQ ID NO: 4095 - RNA, 38 nt, Artificial Sequence
  Description of Artificial Sequence:  Enzymatic Nucleic Acid
  misc_feature (31)..(31): n stands for inosine
cccucccucugaugaggccguuaggccgaangacguag

SEQ ID NO: 4096 - RNA, 38 nt, Artificial Sequence
  Description of Artificial Sequence:  Enzymatic Nucleic Acid
  misc_feature (31)..(31): n stands for inosine
ucccuccccugaugaggccguuaggccgaanggacgua

SEQ ID NO: 4097 - RNA, 38 nt, Artificial Sequence
  Description of Artificial Sequence:  Enzymatic Nucleic Acid
  misc_feature (31)..(31): n stands for inosine
ugggugugcugaugaggccguuaggccgaanccgcccc

SEQ ID NO: 4098 - RNA, 38 nt, Artificial Sequence
  Description of Artificial Sequence:  Enzymatic Nucleic Acid
  misc_feature (31)..(31): n stands for inosine
cugggugucugaugaggccguuaggccgaangccgccc

SEQ ID NO: 4099 - RNA, 38 nt, Artificial Sequence
  Description of Artificial Sequence:  Enzymatic Nucleic Acid
  misc_feature (31)..(31): n stands for inosine
ccugggugcugaugaggccguuaggccgaanggccgcc

SEQ ID NO: 4100 - RNA, 38 nt, Artificial Sequence
  Description of Artificial Sequence:  Enzymatic Nucleic Acid
  misc_feature (31)..(31): n stands for inosine
ggccugggcugaugaggccguuaggccgaanugggccg

SEQ ID NO: 4101 - RNA, 38 nt, Artificial Sequence
  Description of Artificial Sequence:  Enzymatic Nucleic Acid
  misc_feature (31)..(31): n stands for inosine
cgggccugcugaugaggccguuaggccgaanugugggc

SEQ ID NO: 4102 - RNA, 38 nt, Artificial Sequence
  Description of Artificial Sequence:  Enzymatic Nucleic Acid
  misc_feature (31)..(31): n stands for inosine
gcgggccucugaugaggccguuaggccgaanguguggg

SEQ ID NO: 4103 - RNA, 38 nt, Artificial Sequence
  Description of Artificial Sequence:  Enzymatic Nucleic Acid
  misc_feature (31)..(31): n stands for inosine
ugcgggcccugaugaggccguuaggccgaanggugugg

SEQ ID NO: 4104 - RNA, 38 nt, Artificial Sequence
  Description of Artificial Sequence:  Enzymatic Nucleic Acid
  misc_feature (31)..(31): n stands for inosine
gcggugcgcugaugaggccguuaggccgaanccugggu

SEQ ID NO: 4105 - RNA, 38 nt, Artificial Sequence
  Description of Artificial Sequence:  Enzymatic Nucleic Acid
  misc_feature (31)..(31): n stands for inosine
agcggugccugaugaggccguuaggccgaangccuggg

SEQ ID NO: 4106 - RNA, 38 nt, Artificial Sequence
  Description of Artificial Sequence:  Enzymatic Nucleic Acid
  misc_feature (31)..(31): n stands for inosine
cccagcggcugaugaggccguuaggccgaancgggccu

SEQ ID NO: 4107 - RNA, 38 nt, Artificial Sequence
  Description of Artificial Sequence:  Enzymatic Nucleic Acid
  misc_feature (31)..(31): n stands for inosine
cucccagccugaugaggccguuaggccgaanugcgggc

SEQ ID NO: 4108 - RNA, 38 nt, Artificial Sequence
  Description of Artificial Sequence:  Enzymatic Nucleic Acid
  misc_feature (31)..(31): n stands for inosine
agacuccccugaugaggccguuaggccgaancggugcg

SEQ ID NO: 4109 - RNA, 38 nt, Artificial Sequence
  Description of Artificial Sequence:  Enzymatic Nucleic Acid
  misc_feature (31)..(31): n stands for inosine
caggccuccugaugaggccguuaggccgaanacuccca

SEQ ID NO: 4110 - RNA, 38 nt, Artificial Sequence
  Description of Artificial Sequence:  Enzymatic Nucleic Acid
  misc_feature (31)..(31): n stands for inosine
cucacucacugaugaggccguuaggccgaanccucaga

SEQ ID NO: 4111 - RNA, 38 nt, Artificial Sequence
  Description of Artificial Sequence:  Enzymatic Nucleic Acid
  misc_feature (31)..(31): n stands for inosine
acucacuccugaugaggccguuaggccgaangccucag

SEQ ID NO: 4112 - RNA, 38 nt, Artificial Sequence
  Description of Artificial Sequence:  Enzymatic Nucleic Acid
  misc_feature (31)..(31): n stands for inosine
caggccuccugaugaggccguuaggccgaanccaaaca

SEQ ID NO: 4113 - RNA, 38 nt, Artificial Sequence
  Description of Artificial Sequence:  Enzymatic Nucleic Acid
  misc_feature (31)..(31): n stands for inosine
gacaugcacugaugaggccguuaggccgaanccucggc

SEQ ID NO: 4114 - RNA, 38 nt, Artificial Sequence
  Description of Artificial Sequence:  Enzymatic Nucleic Acid
  misc_feature (31)..(31): n stands for inosine
ggacaugccugaugaggccguuaggccgaangccucgg

SEQ ID NO: 4115 - RNA, 38 nt, Artificial Sequence
  Description of Artificial Sequence:  Enzymatic Nucleic Acid
  misc_feature (31)..(31): n stands for inosine
gccggacacugaugaggccguuaggccgaancaggccu

SEQ ID NO: 4116 - RNA, 38 nt, Artificial Sequence
  Description of Artificial Sequence:  Enzymatic Nucleic Acid
  misc_feature (31)..(31): n stands for inosine
cuucagcccugaugaggccguuaggccgaanacaugca

SEQ ID NO: 4117 - RNA, 38 nt, Artificial Sequence
  Description of Artificial Sequence:  Enzymatic Nucleic Acid
  misc_feature (31)..(31): n stands for inosine
cagccuuccugaugaggccguuaggccgaanccggaca

SEQ ID NO: 4118 - RNA, 38 nt, Artificial Sequence
  Description of Artificial Sequence:  Enzymatic Nucleic Acid
  misc_feature (31)..(31): n stands for inosine
ggacacuccugaugaggccguuaggccgaanccuucag

SEQ ID NO: 4119 - RNA, 38 nt, Artificial Sequence
  Description of Artificial Sequence:  Enzymatic Nucleic Acid
  misc_feature (31)..(31): n stands for inosine
ccucagcccugaugaggccguuaggccgaanacacuca

SEQ ID NO: 4120 - RNA, 38 nt, Artificial Sequence
  Description of Artificial Sequence:  Enzymatic Nucleic Acid
  misc_feature (31)..(31): n stands for inosine
caggccuccugaugaggccguuaggccgaanccggaca

SEQ ID NO: 4121 - RNA, 38 nt, Artificial Sequence
  Description of Artificial Sequence:  Enzymatic Nucleic Acid
  misc_feature (31)..(31): n stands for inosine
cucgcucacugaugaggccguuaggccgaanccucagc

SEQ ID NO: 4122 - RNA, 38 nt, Artificial Sequence
  Description of Artificial Sequence:  Enzymatic Nucleic Acid
  misc_feature (31)..(31): n stands for inosine
acucgcuccugaugaggccguuaggccgaangccucag

SEQ ID NO: 4123 - RNA, 38 nt, Artificial Sequence
  Description of Artificial Sequence:  Enzymatic Nucleic Acid
  misc_feature (31)..(31): n stands for inosine
ccuuggcucugaugaggccguuaggccgaanacacucg

SEQ ID NO: 4124 - RNA, 38 nt, Artificial Sequence
  Description of Artificial Sequence:  Enzymatic Nucleic Acid
  misc_feature (31)..(31): n stands for inosine
cccuuggccugaugaggccguuaggccgaangacacuc

SEQ ID NO: 4125 - RNA, 38 nt, Artificial Sequence
  Description of Artificial Sequence:  Enzymatic Nucleic Acid
  misc_feature (31)..(31): n stands for inosine
cagcccuucugaugaggccguuaggccgaancuggaca

SEQ ID NO: 4126 - RNA, 38 nt, Artificial Sequence
  Description of Artificial Sequence:  Enzymatic Nucleic Acid
  misc_feature (31)..(31): n stands for inosine
ucagcccucugaugaggccguuaggccgaangcuggac

SEQ ID NO: 4127 - RNA, 38 nt, Artificial Sequence
  Description of Artificial Sequence:  Enzymatic Nucleic Acid
  misc_feature (31)..(31): n stands for inosine
ggacacuccugaugaggccguuaggccgaancccuugg

SEQ ID NO: 4128 - RNA, 38 nt, Artificial Sequence
  Description of Artificial Sequence:  Enzymatic Nucleic Acid
  misc_feature (31)..(31): n stands for inosine
ggugugcucugaugaggccguuaggccgaanacacuca

SEQ ID NO: 4129 - RNA, 38 nt, Artificial Sequence
  Description of Artificial Sequence:  Enzymatic Nucleic Acid
  misc_feature (31)..(31): n stands for inosine
aggugugccugaugaggccguuaggccgaangacacuc

SEQ ID NO: 4130 - RNA, 38 nt, Artificial Sequence
  Description of Artificial Sequence:  Enzymatic Nucleic Acid
  misc_feature (31)..(31): n stands for inosine
ggcaggugcugaugaggccguuaggccgaancuggaca

SEQ ID NO: 4131 - RNA, 38 nt, Artificial Sequence
  Description of Artificial Sequence:  Enzymatic Nucleic Acid
  misc_feature (31)..(31): n stands for inosine
acggcaggcugaugaggccguuaggccgaanugcugga

SEQ ID NO: 4132 - RNA, 38 nt, Artificial Sequence
  Description of Artificial Sequence:  Enzymatic Nucleic Acid
  misc_feature (31)..(31): n stands for inosine
agacggcacugaugaggccguuaggccgaanugugcug

SEQ ID NO: 4133 - RNA, 38 nt, Artificial Sequence
  Description of Artificial Sequence:  Enzymatic Nucleic Acid
  misc_feature (31)..(31): n stands for inosine
aagacggccugaugaggccguuaggccgaangugugcu

SEQ ID NO: 4134 - RNA, 38 nt, Artificial Sequence
  Description of Artificial Sequence:  Enzymatic Nucleic Acid
  misc_feature (31)..(31): n stands for inosine
gugaagaccugaugaggccguuaggccgaancaggugu

SEQ ID NO: 4135 - RNA, 38 nt, Artificial Sequence
  Description of Artificial Sequence:  Enzymatic Nucleic Acid
  misc_feature (31)..(31): n stands for inosine
ggaagugacugaugaggccguuaggccgaanacggcag

SEQ ID NO: 4136 - RNA, 38 nt, Artificial Sequence
  Description of Artificial Sequence:  Enzymatic Nucleic Acid
  misc_feature (31)..(31): n stands for inosine
uggggaagcugaugaggccguuaggccgaanaagacgg

SEQ ID NO: 4137 - RNA, 38 nt, Artificial Sequence
  Description of Artificial Sequence:  Enzymatic Nucleic Acid
  misc_feature (31)..(31): n stands for inosine
uguggggacugaugaggccguuaggccgaanugaagac

SEQ ID NO: 4138 - RNA, 38 nt, Artificial Sequence
  Description of Artificial Sequence:  Enzymatic Nucleic Acid
  misc_feature (31)..(31): n stands for inosine
gccuguggcugaugaggccguuaggccgaanaagugaa

SEQ ID NO: 4139 - RNA, 38 nt, Artificial Sequence
  Description of Artificial Sequence:  Enzymatic Nucleic Acid
  misc_feature (31)..(31): n stands for inosine
agccugugcugaugaggccguuaggccgaangaaguga

SEQ ID NO: 4140 - RNA, 38 nt, Artificial Sequence
  Description of Artificial Sequence:  Enzymatic Nucleic Acid
  misc_feature (31)..(31): n stands for inosine
cagccugucugaugaggccguuaggccgaanggaagug

SEQ ID NO: 4141 - RNA, 38 nt, Artificial Sequence
  Description of Artificial Sequence:  Enzymatic Nucleic Acid
  misc_feature (31)..(31): n stands for inosine
ccagccugcugaugaggccguuaggccgaangggaagu

SEQ ID NO: 4142 - RNA, 38 nt, Artificial Sequence
  Description of Artificial Sequence:  Enzymatic Nucleic Acid
  misc_feature (31)..(31): n stands for inosine
cgccagcccugaugaggccguuaggccgaanuggggaa

SEQ ID NO: 4143 - RNA, 38 nt, Artificial Sequence
  Description of Artificial Sequence:  Enzymatic Nucleic Acid
  misc_feature (31)..(31): n stands for inosine
cgagcgcccugaugaggccguuaggccgaanccugugg

SEQ ID NO: 4144 - RNA, 38 nt, Artificial Sequence
  Description of Artificial Sequence:  Enzymatic Nucleic Acid
  misc_feature (31)..(31): n stands for inosine
uggagccgcugaugaggccguuaggccgaancgccagc

SEQ ID NO: 4145 - RNA, 38 nt, Artificial Sequence
  Description of Artificial Sequence:  Enzymatic Nucleic Acid
  misc_feature (31)..(31): n stands for inosine
ugggguggcugaugaggccguuaggccgaanccgagcg

SEQ ID NO: 4146 - RNA, 38 nt, Artificial Sequence
  Description of Artificial Sequence:  Enzymatic Nucleic Acid
  misc_feature (31)..(31): n stands for inosine
ccuggggucugaugaggccguuaggccgaanagccgag

SEQ ID NO: 4147 - RNA, 38 nt, Artificial Sequence
  Description of Artificial Sequence:  Enzymatic Nucleic Acid
  misc_feature (31)..(31): n stands for inosine
cccuggggcugaugaggccguuaggccgaangagccga

SEQ ID NO: 4148 - RNA, 38 nt, Artificial Sequence
  Description of Artificial Sequence:  Enzymatic Nucleic Acid
  misc_feature (31)..(31): n stands for inosine
ggcccuggcugaugaggccguuaggccgaanuggagcc

SEQ ID NO: 4149 - RNA, 38 nt, Artificial Sequence
  Description of Artificial Sequence:  Enzymatic Nucleic Acid
  misc_feature (31)..(31): n stands for inosine
uggcccugcugaugaggccguuaggccgaanguggagc

SEQ ID NO: 4150 - RNA, 38 nt, Artificial Sequence
  Description of Artificial Sequence:  Enzymatic Nucleic Acid
  misc_feature (31)..(31): n stands for inosine
cuggcccucugaugaggccguuaggccgaangguggag

SEQ ID NO: 4151 - RNA, 38 nt, Artificial Sequence
  Description of Artificial Sequence:  Enzymatic Nucleic Acid
  misc_feature (31)..(31): n stands for inosine
gcuggccccugaugaggccguuaggccgaangggugga

SEQ ID NO: 4152 - RNA, 38 nt, Artificial Sequence
  Description of Artificial Sequence:  Enzymatic Nucleic Acid
  misc_feature (31)..(31): n stands for inosine
gaaaagcucugaugaggccguuaggccgaancccuggg

SEQ ID NO: 4153 - RNA, 38 nt, Artificial Sequence
  Description of Artificial Sequence:  Enzymatic Nucleic Acid
  misc_feature (31)..(31): n stands for inosine
ggaaaagccugaugaggccguuaggccgaangcccugg

SEQ ID NO: 4154 - RNA, 38 nt, Artificial Sequence
  Description of Artificial Sequence:  Enzymatic Nucleic Acid
  misc_feature (31)..(31): n stands for inosine
ugaggaaacugaugaggccguuaggccgaancuggccc

SEQ ID NO: 4155 - RNA, 38 nt, Artificial Sequence
  Description of Artificial Sequence:  Enzymatic Nucleic Acid
  misc_feature (31)..(31): n stands for inosine
ccuggugacugaugaggccguuaggccgaanaaaagcu

SEQ ID NO: 4156 - RNA, 38 nt, Artificial Sequence
  Description of Artificial Sequence:  Enzymatic Nucleic Acid
  misc_feature (31)..(31): n stands for inosine
uccuggugcugaugaggccguuaggccgaangaaaagc

SEQ ID NO: 4157 - RNA, 38 nt, Artificial Sequence
  Description of Artificial Sequence:  Enzymatic Nucleic Acid
  misc_feature (31)..(31): n stands for inosine
gcuccuggcugaugaggccguuaggccgaanaggaaaa

SEQ ID NO: 4158 - RNA, 38 nt, Artificial Sequence
  Description of Artificial Sequence:  Enzymatic Nucleic Acid
  misc_feature (31)..(31): n stands for inosine
gggcuccucugaugaggccguuaggccgaanugaggaa

SEQ ID NO: 4159 - RNA, 38 nt, Artificial Sequence
  Description of Artificial Sequence:  Enzymatic Nucleic Acid
  misc_feature (31)..(31): n stands for inosine
cgggcucccugaugaggccguuaggccgaangugagga

SEQ ID NO: 4160 - RNA, 38 nt, Artificial Sequence
  Description of Artificial Sequence:  Enzymatic Nucleic Acid
  misc_feature (31)..(31): n stands for inosine
ggaagccgcugaugaggccguuaggccgaancuccugg

SEQ ID NO: 4161 - RNA, 38 nt, Artificial Sequence
  Description of Artificial Sequence:  Enzymatic Nucleic Acid
  misc_feature (31)..(31): n stands for inosine
uggaagcccugaugaggccguuaggccgaangcuccug

SEQ ID NO: 4162 - RNA, 38 nt, Artificial Sequence
  Description of Artificial Sequence:  Enzymatic Nucleic Acid
  misc_feature (31)..(31): n stands for inosine
ggaguggacugaugaggccguuaggccgaanccgggcu

SEQ ID NO: 4163 - RNA, 38 nt, Artificial Sequence
  Description of Artificial Sequence:  Enzymatic Nucleic Acid
  misc_feature (31)..(31): n stands for inosine
uggggagucugaugaggccguuaggccgaanaagccgg

SEQ ID NO: 4164 - RNA, 38 nt, Artificial Sequence
  Description of Artificial Sequence:  Enzymatic Nucleic Acid
  misc_feature (31)..(31): n stands for inosine
guggggagcugaugaggccguuaggccgaangaagccg

SEQ ID NO: 4165 - RNA, 38 nt, Artificial Sequence
  Description of Artificial Sequence:  Enzymatic Nucleic Acid
  misc_feature (31)..(31): n stands for inosine
auguggggcugaugaggccguuaggccgaanuggaagc

SEQ ID NO: 4166 - RNA, 38 nt, Artificial Sequence
  Description of Artificial Sequence:  Enzymatic Nucleic Acid
  misc_feature (31)..(31): n stands for inosine
cuauguggcugaugaggccguuaggccgaanaguggaa

SEQ ID NO: 4167 - RNA, 38 nt, Artificial Sequence
  Description of Artificial Sequence:  Enzymatic Nucleic Acid
  misc_feature (31)..(31): n stands for inosine
ccuaugugcugaugaggccguuaggccgaangagugga

SEQ ID NO: 4168 - RNA, 38 nt, Artificial Sequence
  Description of Artificial Sequence:  Enzymatic Nucleic Acid
  misc_feature (31)..(31): n stands for inosine
uccuaugucugaugaggccguuaggccgaanggagugg

SEQ ID NO: 4169 - RNA, 38 nt, Artificial Sequence
  Description of Artificial Sequence:  Enzymatic Nucleic Acid
  misc_feature (31)..(31): n stands for inosine
uuccuaugcugaugaggccguuaggccgaangggagug

SEQ ID NO: 4170 - RNA, 38 nt, Artificial Sequence
  Description of Artificial Sequence:  Enzymatic Nucleic Acid
  misc_feature (31)..(31): n stands for inosine
uauuccuacugaugaggccguuaggccgaanuggggag

SEQ ID NO: 4171 - RNA, 38 nt, Artificial Sequence
  Description of Artificial Sequence:  Enzymatic Nucleic Acid
  misc_feature (31)..(31): n stands for inosine
cuggggaucugaugaggccguuaggccgaanacuauuc

SEQ ID NO: 4172 - RNA, 38 nt, Artificial Sequence
  Description of Artificial Sequence:  Enzymatic Nucleic Acid
  misc_feature (31)..(31): n stands for inosine
ucuggggacugaugaggccguuaggccgaangacuauu

SEQ ID NO: 4173 - RNA, 38 nt, Artificial Sequence
  Description of Artificial Sequence:  Enzymatic Nucleic Acid
  misc_feature (31)..(31): n stands for inosine
gaaucuggcugaugaggccguuaggccgaanauggacu

SEQ ID NO: 4174 - RNA, 38 nt, Artificial Sequence
  Description of Artificial Sequence:  Enzymatic Nucleic Acid
  misc_feature (31)..(31): n stands for inosine
cgaaucugcugaugaggccguuaggccgaangauggac

SEQ ID NO: 4175 - RNA, 38 nt, Artificial Sequence
  Description of Artificial Sequence:  Enzymatic Nucleic Acid
  misc_feature (31)..(31): n stands for inosine
gcgaaucucugaugaggccguuaggccgaanggaugga

SEQ ID NO: 4176 - RNA, 38 nt, Artificial Sequence
  Description of Artificial Sequence:  Enzymatic Nucleic Acid
  misc_feature (31)..(31): n stands for inosine
ggcgaauccugaugaggccguuaggccgaangggaugg

SEQ ID NO: 4177 - RNA, 38 nt, Artificial Sequence
  Description of Artificial Sequence:  Enzymatic Nucleic Acid
  misc_feature (31)..(31): n stands for inosine
ugaacaaucugaugaggccguuaggccgaancgaaucu

SEQ ID NO: 4178 - RNA, 38 nt, Artificial Sequence
  Description of Artificial Sequence:  Enzymatic Nucleic Acid
  misc_feature (31)..(31): n stands for inosine
gugaacaacugaugaggccguuaggccgaangcgaauc

SEQ ID NO: 4179 - RNA, 38 nt, Artificial Sequence
  Description of Artificial Sequence:  Enzymatic Nucleic Acid
  misc_feature (31)..(31): n stands for inosine
gcgaggggcugaugaggccguuaggccgaanaacaaug

SEQ ID NO: 4180 - RNA, 38 nt, Artificial Sequence
  Description of Artificial Sequence:  Enzymatic Nucleic Acid
  misc_feature (31)..(31): n stands for inosine
gggcgaggcugaugaggccguuaggccgaanugaacaa

SEQ ID NO: 4181 - RNA, 38 nt, Artificial Sequence
  Description of Artificial Sequence:  Enzymatic Nucleic Acid
  misc_feature (31)..(31): n stands for inosine
agggcgagcugaugaggccguuaggccgaangugaaca

SEQ ID NO: 4182 - RNA, 38 nt, Artificial Sequence
  Description of Artificial Sequence:  Enzymatic Nucleic Acid
  misc_feature (31)..(31): n stands for inosine
cagggcgacugaugaggccguuaggccgaanggugaac

SEQ ID NO: 4183 - RNA, 38 nt, Artificial Sequence
  Description of Artificial Sequence:  Enzymatic Nucleic Acid
  misc_feature (31)..(31): n stands for inosine
gcagggcgcugaugaggccguuaggccgaangggugaa

SEQ ID NO: 4184 - RNA, 38 nt, Artificial Sequence
  Description of Artificial Sequence:  Enzymatic Nucleic Acid
  misc_feature (31)..(31): n stands for inosine
gagggcagcugaugaggccguuaggccgaancgagggg

SEQ ID NO: 4185 - RNA, 38 nt, Artificial Sequence
  Description of Artificial Sequence:  Enzymatic Nucleic Acid
  misc_feature (31)..(31): n stands for inosine
ggagggcacugaugaggccguuaggccgaangcgaggg

SEQ ID NO: 4186 - RNA, 38 nt, Artificial Sequence
  Description of Artificial Sequence:  Enzymatic Nucleic Acid
  misc_feature (31)..(31): n stands for inosine
aggagggccugaugaggccguuaggccgaanggcgagg

SEQ ID NO: 4187 - RNA, 38 nt, Artificial Sequence
  Description of Artificial Sequence:  Enzymatic Nucleic Acid
  misc_feature (31)..(31): n stands for inosine
caaaggagcugaugaggccguuaggccgaancagggcg

SEQ ID NO: 4188 - RNA, 38 nt, Artificial Sequence
  Description of Artificial Sequence:  Enzymatic Nucleic Acid
  misc_feature (31)..(31): n stands for inosine
gcaaaggacugaugaggccguuaggccgaangcagggc

SEQ ID NO: 4189 - RNA, 38 nt, Artificial Sequence
  Description of Artificial Sequence:  Enzymatic Nucleic Acid
  misc_feature (31)..(31): n stands for inosine
ggcaaaggcugaugaggccguuaggccgaanggcaggg

SEQ ID NO: 4190 - RNA, 38 nt, Artificial Sequence
  Description of Artificial Sequence:  Enzymatic Nucleic Acid
  misc_feature (31)..(31): n stands for inosine
aaggcaaacugaugaggccguuaggccgaanagggcag

SEQ ID NO: 4191 - RNA, 38 nt, Artificial Sequence
  Description of Artificial Sequence:  Enzymatic Nucleic Acid
  misc_feature (31)..(31): n stands for inosine
gaaggcaacugaugaggccguuaggccgaangagggca

SEQ ID NO: 4192 - RNA, 38 nt, Artificial Sequence
  Description of Artificial Sequence:  Enzymatic Nucleic Acid
  misc_feature (31)..(31): n stands for inosine
ggguggaacugaugaggccguuaggccgaancaaagga

SEQ ID NO: 4193 - RNA, 38 nt, Artificial Sequence
  Description of Artificial Sequence:  Enzymatic Nucleic Acid
  misc_feature (31)..(31): n stands for inosine
gggguggacugaugaggccguuaggccgaangcaaagg

SEQ ID NO: 4194 - RNA, 38 nt, Artificial Sequence
  Description of Artificial Sequence:  Enzymatic Nucleic Acid
  misc_feature (31)..(31): n stands for inosine
gugggggucugaugaggccguuaggccgaanaaggcaa

SEQ ID NO: 4195 - RNA, 38 nt, Artificial Sequence
  Description of Artificial Sequence:  Enzymatic Nucleic Acid
  misc_feature (31)..(31): n stands for inosine
ggugggggcugaugaggccguuaggccgaangaaggca

SEQ ID NO: 4196 - RNA, 38 nt, Artificial Sequence
  Description of Artificial Sequence:  Enzymatic Nucleic Acid
  misc_feature (31)..(31): n stands for inosine
auggugggcugaugaggccguuaggccgaanuggaagg

SEQ ID NO: 4197 - RNA, 38 nt, Artificial Sequence
  Description of Artificial Sequence:  Enzymatic Nucleic Acid
  misc_feature (31)..(31): n stands for inosine
gaugguggcugaugaggccguuaggccgaanguggaag

SEQ ID NO: 4198 - RNA, 38 nt, Artificial Sequence
  Description of Artificial Sequence:  Enzymatic Nucleic Acid
  misc_feature (31)..(31): n stands for inosine
ggauggugcugaugaggccguuaggccgaangguggaa

SEQ ID NO: 4199 - RNA, 38 nt, Artificial Sequence
  Description of Artificial Sequence:  Enzymatic Nucleic Acid
  misc_feature (31)..(31): n stands for inosine
uggauggucugaugaggccguuaggccgaangggugga

SEQ ID NO: 4200 - RNA, 38 nt, Artificial Sequence
  Description of Artificial Sequence:  Enzymatic Nucleic Acid
  misc_feature (31)..(31): n stands for inosine
cuggauggcugaugaggccguuaggccgaanggggugg

SEQ ID NO: 4201 - RNA, 38 nt, Artificial Sequence
  Description of Artificial Sequence:  Enzymatic Nucleic Acid
  misc_feature (31)..(31): n stands for inosine
accuggaucugaugaggccguuaggccgaanugggggu

SEQ ID NO: 4202 - RNA, 38 nt, Artificial Sequence
  Description of Artificial Sequence:  Enzymatic Nucleic Acid
  misc_feature (31)..(31): n stands for inosine
caccuggacugaugaggccguuaggccgaanguggggg

SEQ ID NO: 4203 - RNA, 38 nt, Artificial Sequence
  Description of Artificial Sequence:  Enzymatic Nucleic Acid
  misc_feature (31)..(31): n stands for inosine
cuccaccucugaugaggccguuaggccgaanauggugg

SEQ ID NO: 4204 - RNA, 38 nt, Artificial Sequence
  Description of Artificial Sequence:  Enzymatic Nucleic Acid
  misc_feature (31)..(31): n stands for inosine
ucuccacccugaugaggccguuaggccgaangauggug

SEQ ID NO: 4205 - RNA, 38 nt, Artificial Sequence
  Description of Artificial Sequence:  Enzymatic Nucleic Acid
  misc_feature (31)..(31): n stands for inosine
cuucucagcugaugaggccguuaggccgaanucuccac

SEQ ID NO: 4206 - RNA, 38 nt, Artificial Sequence
  Description of Artificial Sequence:  Enzymatic Nucleic Acid
  misc_feature (31)..(31): n stands for inosine
ccuucucacugaugaggccguuaggccgaangucucca

SEQ ID NO: 4207 - RNA, 38 nt, Artificial Sequence
  Description of Artificial Sequence:  Enzymatic Nucleic Acid
  misc_feature (31)..(31): n stands for inosine
uccuucuccugaugaggccguuaggccgaanggucucc

SEQ ID NO: 4208 - RNA, 38 nt, Artificial Sequence
  Description of Artificial Sequence:  Enzymatic Nucleic Acid
  misc_feature (31)..(31): n stands for inosine
gcucccagcugaugaggccguuaggccgaanuccuucu

SEQ ID NO: 4209 - RNA, 38 nt, Artificial Sequence
  Description of Artificial Sequence:  Enzymatic Nucleic Acid
  misc_feature (31)..(31): n stands for inosine
agcucccacugaugaggccguuaggccgaanguccuuc

SEQ ID NO: 4210 - RNA, 38 nt, Artificial Sequence
  Description of Artificial Sequence:  Enzymatic Nucleic Acid
  misc_feature (31)..(31): n stands for inosine
gagcuccccugaugaggccguuaggccgaangguccuu

SEQ ID NO: 4211 - RNA, 38 nt, Artificial Sequence
  Description of Artificial Sequence:  Enzymatic Nucleic Acid
  misc_feature (31)..(31): n stands for inosine
auucccagcugaugaggccguuaggccgaancucccag

SEQ ID NO: 4212 - RNA, 38 nt, Artificial Sequence
  Description of Artificial Sequence:  Enzymatic Nucleic Acid
  misc_feature (31)..(31): n stands for inosine
aaauuccccugaugaggccguuaggccgaanagcuccc

SEQ ID NO: 4213 - RNA, 38 nt, Artificial Sequence
  Description of Artificial Sequence:  Enzymatic Nucleic Acid
  misc_feature (31)..(31): n stands for inosine
acaccuuucugaugaggccguuaggccgaanucacucc

SEQ ID NO: 4214 - RNA, 38 nt, Artificial Sequence
  Description of Artificial Sequence:  Enzymatic Nucleic Acid
  misc_feature (31)..(31): n stands for inosine
cacaccuucugaugaggccguuaggccgaangucacuc

SEQ ID NO: 4215 - RNA, 38 nt, Artificial Sequence
  Description of Artificial Sequence:  Enzymatic Nucleic Acid
  misc_feature (31)..(31): n stands for inosine
guguacagcugaugaggccguuaggccgaancacaccu

SEQ ID NO: 4216 - RNA, 38 nt, Artificial Sequence
  Description of Artificial Sequence:  Enzymatic Nucleic Acid
  misc_feature (31)..(31): n stands for inosine
uguguacacugaugaggccguuaggccgaangcacacc

SEQ ID NO: 4217 - RNA, 38 nt, Artificial Sequence
  Description of Artificial Sequence:  Enzymatic Nucleic Acid
  misc_feature (31)..(31): n stands for inosine
cuguguaccugaugaggccguuaggccgaanggcacac

SEQ ID NO: 4218 - RNA, 38 nt, Artificial Sequence
  Description of Artificial Sequence:  Enzymatic Nucleic Acid
  misc_feature (31)..(31): n stands for inosine
cucgccugcugaugaggccguuaggccgaanuacaggg

SEQ ID NO: 4219 - RNA, 38 nt, Artificial Sequence
  Description of Artificial Sequence:  Enzymatic Nucleic Acid
  misc_feature (31)..(31): n stands for inosine
uccucgcccugaugaggccguuaggccgaanuguacag

SEQ ID NO: 4220 - RNA, 38 nt, Artificial Sequence
  Description of Artificial Sequence:  Enzymatic Nucleic Acid
  misc_feature (31)..(31): n stands for inosine
aggugcagcugaugaggccguuaggccgaanuccucgc

SEQ ID NO: 4221 - RNA, 38 nt, Artificial Sequence
  Description of Artificial Sequence:  Enzymatic Nucleic Acid
  misc_feature (31)..(31): n stands for inosine
caggugcacugaugaggccguuaggccgaanguccucg

SEQ ID NO: 4222 - RNA, 38 nt, Artificial Sequence
  Description of Artificial Sequence:  Enzymatic Nucleic Acid
  misc_feature (31)..(31): n stands for inosine
ccaggugccugaugaggccguuaggccgaangguccuc

SEQ ID NO: 4223 - RNA, 38 nt, Artificial Sequence
  Description of Artificial Sequence:  Enzymatic Nucleic Acid
  misc_feature (31)..(31): n stands for inosine
cauccaggcugaugaggccguuaggccgaancaggguc

SEQ ID NO: 4224 - RNA, 38 nt, Artificial Sequence
  Description of Artificial Sequence:  Enzymatic Nucleic Acid
  misc_feature (31)..(31): n stands for inosine
cccauccacugaugaggccguuaggccgaanugcaggg

SEQ ID NO: 4225 - RNA, 38 nt, Artificial Sequence
  Description of Artificial Sequence:  Enzymatic Nucleic Acid
  misc_feature (31)..(31): n stands for inosine
ccccaucccugaugaggccguuaggccgaangugcagg

SEQ ID NO: 4226 - RNA, 38 nt, Artificial Sequence
  Description of Artificial Sequence:  Enzymatic Nucleic Acid
  misc_feature (31)..(31): n stands for inosine
acccacagcugaugaggccguuaggccgaanaccccca

SEQ ID NO: 4227 - RNA, 38 nt, Artificial Sequence
  Description of Artificial Sequence:  Enzymatic Nucleic Acid
  misc_feature (31)..(31): n stands for inosine
gacccacacugaugaggccguuaggccgaangaccccc

SEQ ID NO: 4228 - RNA, 38 nt, Artificial Sequence
  Description of Artificial Sequence:  Enzymatic Nucleic Acid
  misc_feature (31)..(31): n stands for inosine
ugacccaccugaugaggccguuaggccgaanggacccc

SEQ ID NO: 4229 - RNA, 38 nt, Artificial Sequence
  Description of Artificial Sequence:  Enzymatic Nucleic Acid
  misc_feature (31)..(31): n stands for inosine
ccccaauucugaugaggccguuaggccgaanacccaca

SEQ ID NO: 4230 - RNA, 38 nt, Artificial Sequence
  Description of Artificial Sequence:  Enzymatic Nucleic Acid
  misc_feature (31)..(31): n stands for inosine
acucccaccugaugaggccguuaggccgaancaccucc

SEQ ID NO: 4231 - RNA, 38 nt, Artificial Sequence
  Description of Artificial Sequence:  Enzymatic Nucleic Acid
  misc_feature (31)..(31): n stands for inosine
auauauuccugaugaggccguuaggccgaanuauuuua

SEQ ID NO: 4232 - RNA, 38 nt, Artificial Sequence
  Description of Artificial Sequence:  Enzymatic Nucleic Acid
  misc_feature (31)..(31): n stands for inosine
uucaaaaccugaugaggccguuaggccgaanaaaaacu

SEQ ID NO: 4233 - RNA, 36 nt, Artificial Sequence
  Description of Artificial Sequence:  Enzymatic Nucleic Acid
cgcagugauggcaugcacuaugcgcgaggacgcagc

SEQ ID NO: 4234 - RNA, 36 nt, Artificial Sequence
  Description of Artificial Sequence:  Enzymatic Nucleic Acid
gugcgugauggcaugcacuaugcgcgagcaggacgc

SEQ ID NO: 4235 - RNA, 36 nt, Artificial Sequence
  Description of Artificial Sequence:  Enzymatic Nucleic Acid
acgugugauggcaugcacuaugcgcggcagcaggac

SEQ ID NO: 4236 - RNA, 36 nt, Artificial Sequence
  Description of Artificial Sequence:  Enzymatic Nucleic Acid
caucgugauggcaugcacuaugcgcgggggguggcc

SEQ ID NO: 4237 - RNA, 36 nt, Artificial Sequence
  Description of Artificial Sequence:  Enzymatic Nucleic Acid
ggcauugauggcaugcacuaugcgcggcgggggugg

SEQ ID NO: 4238 - RNA, 36 nt, Artificial Sequence
  Description of Artificial Sequence:  Enzymatic Nucleic Acid
cgcggugauggcaugcacuaugcgcgaucgcggggg

SEQ ID NO: 4239 - RNA, 36 nt, Artificial Sequence
  Description of Artificial Sequence:  Enzymatic Nucleic Acid
gcgcgugauggcaugcacuaugcgcgggcaucgcgg

SEQ ID NO: 4240 - RNA, 36 nt, Artificial Sequence
  Description of Artificial Sequence:  Enzymatic Nucleic Acid
gagcgugauggcaugcacuaugcgcggcggcaucgc

SEQ ID NO: 4241 - RNA, 36 nt, Artificial Sequence
  Description of Artificial Sequence:  Enzymatic Nucleic Acid
gggagugauggcaugcacuaugcgcggcgcggcauc

SEQ ID NO: 4242 - RNA, 36 nt, Artificial Sequence
  Description of Artificial Sequence:  Enzymatic Nucleic Acid
ggcagugauggcaugcacuaugcgcgggggagcgcg

SEQ ID NO: 4243 - RNA, 36 nt, Artificial Sequence
  Description of Artificial Sequence:  Enzymatic Nucleic Acid
cucggugauggcaugcacuaugcgcgagcggggagc

SEQ ID NO: 4244 - RNA, 36 nt, Artificial Sequence
  Description of Artificial Sequence:  Enzymatic Nucleic Acid
cggcuugauggcaugcacuaugcgcgggcagcgggg

SEQ ID NO: 4245 - RNA, 36 nt, Artificial Sequence
  Description of Artificial Sequence:  Enzymatic Nucleic Acid
gagcgugauggcaugcacuaugcgcgacggcucggc

SEQ ID NO: 4246 - RNA, 36 nt, Artificial Sequence
  Description of Artificial Sequence:  Enzymatic Nucleic Acid
gggagugauggcaugcacuaugcgcggcacggcucg

SEQ ID NO: 4247 - RNA, 36 nt, Artificial Sequence
  Description of Artificial Sequence:  Enzymatic Nucleic Acid
cgcagugauggcaugcacuaugcgcgagggagcgca

SEQ ID NO: 4248 - RNA, 36 nt, Artificial Sequence
  Description of Artificial Sequence:  Enzymatic Nucleic Acid
cugcgugauggcaugcacuaugcgcgagcagggagc

SEQ ID NO: 4249 - RNA, 36 nt, Artificial Sequence
  Description of Artificial Sequence:  Enzymatic Nucleic Acid
ggcugugauggcaugcacuaugcgcggcagcaggga

SEQ ID NO: 4250 - RNA, 36 nt, Artificial Sequence
  Description of Artificial Sequence:  Enzymatic Nucleic Acid
ccucgugauggcaugcacuaugcgcggguaguggcu

SEQ ID NO: 4251 - RNA, 36 nt, Artificial Sequence
  Description of Artificial Sequence:  Enzymatic Nucleic Acid
caccuugauggcaugcacuaugcgcggcgguagugg

SEQ ID NO: 4252 - RNA, 36 nt, Artificial Sequence
  Description of Artificial Sequence:  Enzymatic Nucleic Acid
ggcagugauggcaugcacuaugcgcgaccucgcggu

SEQ ID NO: 4253 - RNA, 36 nt, Artificial Sequence
  Description of Artificial Sequence:  Enzymatic Nucleic Acid
agcggugauggcaugcacuaugcgcgagcaccucgc

SEQ ID NO: 4254 - RNA, 36 nt, Artificial Sequence
  Description of Artificial Sequence:  Enzymatic Nucleic Acid
gccagugauggcaugcacuaugcgcgggcagcaccu

SEQ ID NO: 4255 - RNA, 36 nt, Artificial Sequence
  Description of Artificial Sequence:  Enzymatic Nucleic Acid
cgccgugauggcaugcacuaugcgcgacgaacgugg

SEQ ID NO: 4256 - RNA, 36 nt, Artificial Sequence
  Description of Artificial Sequence:  Enzymatic Nucleic Acid
ccaggugauggcaugcacuaugcgcggccgcacgaa

SEQ ID NO: 4257 - RNA, 36 nt, Artificial Sequence
  Description of Artificial Sequence:  Enzymatic Nucleic Acid
cgcugugauggcaugcacuaugcgcgaccagccgcc

SEQ ID NO: 4258 - RNA, 36 nt, Artificial Sequence
  Description of Artificial Sequence:  Enzymatic Nucleic Acid
ccccgugauggcaugcacuaugcgcggcugcaccag

SEQ ID NO: 4259 - RNA, 36 nt, Artificial Sequence
  Description of Artificial Sequence:  Enzymatic Nucleic Acid
gcgcgugauggcaugcacuaugcgcgggaaagccgc

SEQ ID NO: 4260 - RNA, 36 nt, Artificial Sequence
  Description of Artificial Sequence:  Enzymatic Nucleic Acid
cagcgugauggcaugcacuaugcgcggcggaaagcc

SEQ ID NO: 4261 - RNA, 36 nt, Artificial Sequence
  Description of Artificial Sequence:  Enzymatic Nucleic Acid
accagugauggcaugcacuaugcgcggcgcggaaag

SEQ ID NO: 4262 - RNA, 36 nt, Artificial Sequence
  Description of Artificial Sequence:  Enzymatic Nucleic Acid
ccaggugauggcaugcacuaugcgcgacugggccac

SEQ ID NO: 4263 - RNA, 36 nt, Artificial Sequence
  Description of Artificial Sequence:  Enzymatic Nucleic Acid
acgcaugauggcaugcacuaugcgcgaccaggcacu

SEQ ID NO: 4264 - RNA, 36 nt, Artificial Sequence
  Description of Artificial Sequence:  Enzymatic Nucleic Acid
gcacgugauggcaugcacuaugcgcgacaccaggca

SEQ ID NO: 4265 - RNA, 36 nt, Artificial Sequence
  Description of Artificial Sequence:  Enzymatic Nucleic Acid
cagggugauggcaugcacuaugcgcgacgcacacca

SEQ ID NO: 4266 - RNA, 36 nt, Artificial Sequence
  Description of Artificial Sequence:  Enzymatic Nucleic Acid
ccgugugauggcaugcacuaugcgcggucccagggc

SEQ ID NO: 4267 - RNA, 36 nt, Artificial Sequence
  Description of Artificial Sequence:  Enzymatic Nucleic Acid
gggggugauggcaugcacuaugcgcgggccgugcgu

SEQ ID NO: 4268 - RNA, 36 nt, Artificial Sequence
  Description of Artificial Sequence:  Enzymatic Nucleic Acid
ggcggugauggcaugcacuaugcgcgggggggcggc

SEQ ID NO: 4269 - RNA, 36 nt, Artificial Sequence
  Description of Artificial Sequence:  Enzymatic Nucleic Acid
gggggugauggcaugcacuaugcgcgggcggggggc

SEQ ID NO: 4270 - RNA, 36 nt, Artificial Sequence
  Description of Artificial Sequence:  Enzymatic Nucleic Acid
ccuggugauggcaugcacuaugcgcgggaaggaggg

SEQ ID NO: 4271 - RNA, 36 nt, Artificial Sequence
  Description of Artificial Sequence:  Enzymatic Nucleic Acid
caggaugauggcaugcacuaugcgcgaccuggcgga

SEQ ID NO: 4272 - RNA, 36 nt, Artificial Sequence
  Description of Artificial Sequence:  Enzymatic Nucleic Acid
ucaggugauggcaugcacuaugcgcgaggacaccug

SEQ ID NO: 4273 - RNA, 36 nt, Artificial Sequence
  Description of Artificial Sequence:  Enzymatic Nucleic Acid
uccuuugauggcaugcacuaugcgcgaggcaggaca

SEQ ID NO: 4274 - RNA, 36 nt, Artificial Sequence
  Description of Artificial Sequence:  Enzymatic Nucleic Acid
gcacuugauggcaugcacuaugcgcggggccaccag

SEQ ID NO: 4275 - RNA, 36 nt, Artificial Sequence
  Description of Artificial Sequence:  Enzymatic Nucleic Acid
ugcagugauggcaugcacuaugcgcgacucgggcca

SEQ ID NO: 4276 - RNA, 36 nt, Artificial Sequence
  Description of Artificial Sequence:  Enzymatic Nucleic Acid
cucugugauggcaugcacuaugcgcgagcacucggg

SEQ ID NO: 4277 - RNA, 36 nt, Artificial Sequence
  Description of Artificial Sequence:  Enzymatic Nucleic Acid
ucgcaugauggcaugcacuaugcgcgagccucugca

SEQ ID NO: 4278 - RNA, 36 nt, Artificial Sequence
  Description of Artificial Sequence:  Enzymatic Nucleic Acid
gcucgugauggcaugcacuaugcgcgacagccucug

SEQ ID NO: 4279 - RNA, 36 nt, Artificial Sequence
  Description of Artificial Sequence:  Enzymatic Nucleic Acid
gcgcuugauggcaugcacuaugcgcggcacagccuc

SEQ ID NO: 4280 - RNA, 36 nt, Artificial Sequence
  Description of Artificial Sequence:  Enzymatic Nucleic Acid
cgccgugauggcaugcacuaugcgcggcucgcacag

SEQ ID NO: 4281 - RNA, 36 nt, Artificial Sequence
  Description of Artificial Sequence:  Enzymatic Nucleic Acid
cuucgugauggcaugcacuaugcgcggccgcgcucg

SEQ ID NO: 4282 - RNA, 36 nt, Artificial Sequence
  Description of Artificial Sequence:  Enzymatic Nucleic Acid
uucuuugauggcaugcacuaugcgcggcgccgcgcu

SEQ ID NO: 4283 - RNA, 36 nt, Artificial Sequence
  Description of Artificial Sequence:  Enzymatic Nucleic Acid
gccagugauggcaugcacuaugcgcgacguucuucg

SEQ ID NO: 4284 - RNA, 36 nt, Artificial Sequence
  Description of Artificial Sequence:  Enzymatic Nucleic Acid
cagcgugauggcaugcacuaugcgcggaagccgaag

SEQ ID NO: 4285 - RNA, 36 nt, Artificial Sequence
  Description of Artificial Sequence:  Enzymatic Nucleic Acid
agcagugauggcaugcacuaugcgcggcgaagccga

SEQ ID NO: 4286 - RNA, 36 nt, Artificial Sequence
  Description of Artificial Sequence:  Enzymatic Nucleic Acid
uccagugauggcaugcacuaugcgcgagcgcgaagc

SEQ ID NO: 4287 - RNA, 36 nt, Artificial Sequence
  Description of Artificial Sequence:  Enzymatic Nucleic Acid
ccccgugauggcaugcacuaugcgcggggccccguc

SEQ ID NO: 4288 - RNA, 36 nt, Artificial Sequence
  Description of Artificial Sequence:  Enzymatic Nucleic Acid
ggccuugauggcaugcacuaugcgcggggggggccc

SEQ ID NO: 4289 - RNA, 36 nt, Artificial Sequence
  Description of Artificial Sequence:  Enzymatic Nucleic Acid
cugcgugauggcaugcacuaugcgcgacgcuggugg

SEQ ID NO: 4290 - RNA, 36 nt, Artificial Sequence
  Description of Artificial Sequence:  Enzymatic Nucleic Acid
agcugugauggcaugcacuaugcgcggcacgcuggu

SEQ ID NO: 4291 - RNA, 36 nt, Artificial Sequence
  Description of Artificial Sequence:  Enzymatic Nucleic Acid
uugggugauggcaugcacuaugcgcgagguagcugc

SEQ ID NO: 4292 - RNA, 36 nt, Artificial Sequence
  Description of Artificial Sequence:  Enzymatic Nucleic Acid
ucgguugauggcaugcacuaugcgcgaccguguugg

SEQ ID NO: 4293 - RNA, 36 nt, Artificial Sequence
  Description of Artificial Sequence:  Enzymatic Nucleic Acid
ugcguugauggcaugcacuaugcgcgggucaccgug

SEQ ID NO: 4294 - RNA, 36 nt, Artificial Sequence
  Description of Artificial Sequence:  Enzymatic Nucleic Acid
cagugugauggcaugcacuaugcgcggucggucacc

SEQ ID NO: 4295 - RNA, 36 nt, Artificial Sequence
  Description of Artificial Sequence:  Enzymatic Nucleic Acid
ccccgugauggcaugcacuaugcgcgagugcgucgg

SEQ ID NO: 4296 - RNA, 36 nt, Artificial Sequence
  Description of Artificial Sequence:  Enzymatic Nucleic Acid
agcagugauggcaugcacuaugcgcgagcccccacg

SEQ ID NO: 4297 - RNA, 36 nt, Artificial Sequence
  Description of Artificial Sequence:  Enzymatic Nucleic Acid
cgcagugauggcaugcacuaugcgcgagcagccccc

SEQ ID NO: 4298 - RNA, 36 nt, Artificial Sequence
  Description of Artificial Sequence:  Enzymatic Nucleic Acid
cggcgugauggcaugcacuaugcgcgagcagcagcc

SEQ ID NO: 4299 - RNA, 36 nt, Artificial Sequence
  Description of Artificial Sequence:  Enzymatic Nucleic Acid
cgcggugauggcaugcacuaugcgcggcagcagcag

SEQ ID NO: 4300 - RNA, 36 nt, Artificial Sequence
  Description of Artificial Sequence:  Enzymatic Nucleic Acid
ccacgugauggcaugcacuaugcgcgggcgcagcag

SEQ ID NO: 4301 - RNA, 36 nt, Artificial Sequence
  Description of Artificial Sequence:  Enzymatic Nucleic Acid
gucguugauggcaugcacuaugcgcggcccacgcgg

SEQ ID NO: 4302 - RNA, 36 nt, Artificial Sequence
  Description of Artificial Sequence:  Enzymatic Nucleic Acid
cacguugauggcaugcacuaugcgcggucgcccacg

SEQ ID NO: 4303 - RNA, 36 nt, Artificial Sequence
  Description of Artificial Sequence:  Enzymatic Nucleic Acid
accagugauggcaugcacuaugcgcgacgucgucgc

SEQ ID NO: 4304 - RNA, 36 nt, Artificial Sequence
  Description of Artificial Sequence:  Enzymatic Nucleic Acid
gccagugauggcaugcacuaugcgcgaggugaacca

SEQ ID NO: 4305 - RNA, 36 nt, Artificial Sequence
  Description of Artificial Sequence:  Enzymatic Nucleic Acid
cgcagugauggcaugcacuaugcgcggugccagcag

SEQ ID NO: 4306 - RNA, 36 nt, Artificial Sequence
  Description of Artificial Sequence:  Enzymatic Nucleic Acid
gcgcgugauggcaugcacuaugcgcgagcgugccag

SEQ ID NO: 4307 - RNA, 36 nt, Artificial Sequence
  Description of Artificial Sequence:  Enzymatic Nucleic Acid
gagcgugauggcaugcacuaugcgcggcagcgugcc

SEQ ID NO: 4308 - RNA, 36 nt, Artificial Sequence
  Description of Artificial Sequence:  Enzymatic Nucleic Acid
aagagugauggcaugcacuaugcgcggcgcagcgug

SEQ ID NO: 4309 - RNA, 36 nt, Artificial Sequence
  Description of Artificial Sequence:  Enzymatic Nucleic Acid
cagcaugauggcaugcacuaugcgcgaaagagcgcg

SEQ ID NO: 4310 - RNA, 36 nt, Artificial Sequence
  Description of Artificial Sequence:  Enzymatic Nucleic Acid
accagugauggcaugcacuaugcgcgacaaagagcg

SEQ ID NO: 4311 - RNA, 36 nt, Artificial Sequence
  Description of Artificial Sequence:  Enzymatic Nucleic Acid
aggcgugauggcaugcacuaugcgcgagcugggagc

SEQ ID NO: 4312 - RNA, 36 nt, Artificial Sequence
  Description of Artificial Sequence:  Enzymatic Nucleic Acid
guaggugauggcaugcacuaugcgcggcagcuggga

SEQ ID NO: 4313 - RNA, 36 nt, Artificial Sequence
  Description of Artificial Sequence:  Enzymatic Nucleic Acid
ccgcaugauggcaugcacuaugcgcgaccugguagg

SEQ ID NO: 4314 - RNA, 36 nt, Artificial Sequence
  Description of Artificial Sequence:  Enzymatic Nucleic Acid
gcccgugauggcaugcacuaugcgcgacaccuggua

SEQ ID NO: 4315 - RNA, 36 nt, Artificial Sequence
  Description of Artificial Sequence:  Enzymatic Nucleic Acid
agcggugauggcaugcacuaugcgcgggcccgcaca

SEQ ID NO: 4316 - RNA, 36 nt, Artificial Sequence
  Description of Artificial Sequence:  Enzymatic Nucleic Acid
uacagugauggcaugcacuaugcgcgggcggcccgc

SEQ ID NO: 4317 - RNA, 36 nt, Artificial Sequence
  Description of Artificial Sequence:  Enzymatic Nucleic Acid
ugguaugauggcaugcacuaugcgcgagcggcggcc

SEQ ID NO: 4318 - RNA, 36 nt, Artificial Sequence
  Description of Artificial Sequence:  Enzymatic Nucleic Acid
ggcagugauggcaugcacuaugcgcggccgagcugg

SEQ ID NO: 4319 - RNA, 36 nt, Artificial Sequence
  Description of Artificial Sequence:  Enzymatic Nucleic Acid
aguggugauggcaugcacuaugcgcgagcgccgagc

SEQ ID NO: 4320 - RNA, 36 nt, Artificial Sequence
  Description of Artificial Sequence:  Enzymatic Nucleic Acid
uguggugauggcaugcacuaugcgcggggggccggg

SEQ ID NO: 4321 - RNA, 36 nt, Artificial Sequence
  Description of Artificial Sequence:  Enzymatic Nucleic Acid
acuagugauggcaugcacuaugcgcgguguggcggg

SEQ ID NO: 4322 - RNA, 36 nt, Artificial Sequence
  Description of Artificial Sequence:  Enzymatic Nucleic Acid
gccuuugauggcaugcacuaugcgcggggguccacu

SEQ ID NO: 4323 - RNA, 36 nt, Artificial Sequence
  Description of Artificial Sequence:  Enzymatic Nucleic Acid
guucgugauggcaugcacuaugcgcgaucccagacg

SEQ ID NO: 4324 - RNA, 36 nt, Artificial Sequence
  Description of Artificial Sequence:  Enzymatic Nucleic Acid
ccguuugauggcaugcacuaugcgcggcaucccaga

SEQ ID NO: 4325 - RNA, 36 nt, Artificial Sequence
  Description of Artificial Sequence:  Enzymatic Nucleic Acid
gcuggugauggcaugcacuaugcgcgaggcccaggg

SEQ ID NO: 4326 - RNA, 36 nt, Artificial Sequence
  Description of Artificial Sequence:  Enzymatic Nucleic Acid
ccucgugauggcaugcacuaugcgcgacccggggcu

SEQ ID NO: 4327 - RNA, 36 nt, Artificial Sequence
  Description of Artificial Sequence:  Enzymatic Nucleic Acid
cuccuugauggcaugcacuaugcgcggcacccgggg

SEQ ID NO: 4328 - RNA, 36 nt, Artificial Sequence
  Description of Artificial Sequence:  Enzymatic Nucleic Acid
ccccgugauggcaugcacuaugcgcggccuccucgc

SEQ ID NO: 4329 - RNA, 36 nt, Artificial Sequence
  Description of Artificial Sequence:  Enzymatic Nucleic Acid
gcuggugauggcaugcacuaugcgcgacugcccccg

SEQ ID NO: 4330 - RNA, 36 nt, Artificial Sequence
  Description of Artificial Sequence:  Enzymatic Nucleic Acid
gacuuugauggcaugcacuaugcgcgggcuggcacu

SEQ ID NO: 4331 - RNA, 36 nt, Artificial Sequence
  Description of Artificial Sequence:  Enzymatic Nucleic Acid
aacggugauggcaugcacuaugcgcgagacuucggc

SEQ ID NO: 4332 - RNA, 36 nt, Artificial Sequence
  Description of Artificial Sequence:  Enzymatic Nucleic Acid
uugggugauggcaugcacuaugcgcgaacggcagac

SEQ ID NO: 4333 - RNA, 36 nt, Artificial Sequence
  Description of Artificial Sequence:  Enzymatic Nucleic Acid
ggcagugauggcaugcacuaugcgcggccacgccug

SEQ ID NO: 4334 - RNA, 36 nt, Artificial Sequence
  Description of Artificial Sequence:  Enzymatic Nucleic Acid
aggggugauggcaugcacuaugcgcgagcgccacgc

SEQ ID NO: 4335 - RNA, 36 nt, Artificial Sequence
  Description of Artificial Sequence:  Enzymatic Nucleic Acid
cggcuugauggcaugcacuaugcgcgaggggcagcg

SEQ ID NO: 4336 - RNA, 36 nt, Artificial Sequence
  Description of Artificial Sequence:  Enzymatic Nucleic Acid
acgggugauggcaugcacuaugcgcgguccgcuccg

SEQ ID NO: 4337 - RNA, 36 nt, Artificial Sequence
  Description of Artificial Sequence:  Enzymatic Nucleic Acid
ccacgugauggcaugcacuaugcgcgguccugcccg

SEQ ID NO: 4338 - RNA, 36 nt, Artificial Sequence
  Description of Artificial Sequence:  Enzymatic Nucleic Acid
ucacuugauggcaugcacuaugcgcggguccacgcg

SEQ ID NO: 4339 - RNA, 36 nt, Artificial Sequence
  Description of Artificial Sequence:  Enzymatic Nucleic Acid
acgguugauggcaugcacuaugcgcgacucggucca

SEQ ID NO: 4340 - RNA, 36 nt, Artificial Sequence
  Description of Artificial Sequence:  Enzymatic Nucleic Acid
ccacaugauggcaugcacuaugcgcgagaaaccacg

SEQ ID NO: 4341 - RNA, 36 nt, Artificial Sequence
  Description of Artificial Sequence:  Enzymatic Nucleic Acid
caccaugauggcaugcacuaugcgcgacagaaacca

SEQ ID NO: 4342 - RNA, 36 nt, Artificial Sequence
  Description of Artificial Sequence:  Enzymatic Nucleic Acid
ggugaugauggcaugcacuaugcgcgaccacacaga

SEQ ID NO: 4343 - RNA, 36 nt, Artificial Sequence
  Description of Artificial Sequence:  Enzymatic Nucleic Acid
ucuggugauggcaugcacuaugcgcgaggugacacc

SEQ ID NO: 4344 - RNA, 36 nt, Artificial Sequence
  Description of Artificial Sequence:  Enzymatic Nucleic Acid
uucggugauggcaugcacuaugcgcggggucuggca

SEQ ID NO: 4345 - RNA, 36 nt, Artificial Sequence
  Description of Artificial Sequence:  Enzymatic Nucleic Acid
uucuuugauggcaugcacuaugcgcgggcgggucug

SEQ ID NO: 4346 - RNA, 36 nt, Artificial Sequence
  Description of Artificial Sequence:  Enzymatic Nucleic Acid
gagcgugauggcaugcacuaugcgcgacccuccaaa

SEQ ID NO: 4347 - RNA, 36 nt, Artificial Sequence
  Description of Artificial Sequence:  Enzymatic Nucleic Acid
gagagugauggcaugcacuaugcgcggcacccucca

SEQ ID NO: 4348 - RNA, 36 nt, Artificial Sequence
  Description of Artificial Sequence:  Enzymatic Nucleic Acid
uggcgugauggcaugcacuaugcgcggugccagaga

SEQ ID NO: 4349 - RNA, 36 nt, Artificial Sequence
  Description of Artificial Sequence:  Enzymatic Nucleic Acid
aguggugauggcaugcacuaugcgcggcgugccaga

SEQ ID NO: 4350 - RNA, 36 nt, Artificial Sequence
  Description of Artificial Sequence:  Enzymatic Nucleic Acid
gcuggugauggcaugcacuaugcgcgggcccacgga

SEQ ID NO: 4351 - RNA, 36 nt, Artificial Sequence
  Description of Artificial Sequence:  Enzymatic Nucleic Acid
gcccgugauggcaugcacuaugcgcgguggugcugg

SEQ ID NO: 4352 - RNA, 36 nt, Artificial Sequence
  Description of Artificial Sequence:  Enzymatic Nucleic Acid
ggccgugauggcaugcacuaugcgcggauguggaug

SEQ ID NO: 4353 - RNA, 36 nt, Artificial Sequence
  Description of Artificial Sequence:  Enzymatic Nucleic Acid
caaggugauggcaugcacuaugcgcggugucccagg

SEQ ID NO: 4354 - RNA, 36 nt, Artificial Sequence
  Description of Artificial Sequence:  Enzymatic Nucleic Acid
ggggaugauggcaugcacuaugcgcgaaggcguguc

SEQ ID NO: 4355 - RNA, 36 nt, Artificial Sequence
  Description of Artificial Sequence:  Enzymatic Nucleic Acid
gcguaugauggcaugcacuaugcgcgaccgggggac

SEQ ID NO: 4356 - RNA, 36 nt, Artificial Sequence
  Description of Artificial Sequence:  Enzymatic Nucleic Acid
cucggugauggcaugcacuaugcgcgguacaccggg

SEQ ID NO: 4357 - RNA, 36 nt, Artificial Sequence
  Description of Artificial Sequence:  Enzymatic Nucleic Acid
ggucuugauggcaugcacuaugcgcgggcguacacc

SEQ ID NO: 4358 - RNA, 36 nt, Artificial Sequence
  Description of Artificial Sequence:  Enzymatic Nucleic Acid
cuuguugauggcaugcacuaugcgcggccugaggag

SEQ ID NO: 4359 - RNA, 36 nt, Artificial Sequence
  Description of Artificial Sequence:  Enzymatic Nucleic Acid
ggccgugauggcaugcacuaugcgcgagcugcuccu

SEQ ID NO: 4360 - RNA, 36 nt, Artificial Sequence
  Description of Artificial Sequence:  Enzymatic Nucleic Acid
ggccuugauggcaugcacuaugcgcgagagagcuga

SEQ ID NO: 4361 - RNA, 36 nt, Artificial Sequence
  Description of Artificial Sequence:  Enzymatic Nucleic Acid
ccaguugauggcaugcacuaugcgcgaggcugggcc

SEQ ID NO: 4362 - RNA, 36 nt, Artificial Sequence
  Description of Artificial Sequence:  Enzymatic Nucleic Acid
ccgagugauggcaugcacuaugcgcggccagucagg

SEQ ID NO: 4363 - RNA, 36 nt, Artificial Sequence
  Description of Artificial Sequence:  Enzymatic Nucleic Acid
ccuggugauggcaugcacuaugcgcgauccagggcc

SEQ ID NO: 4364 - RNA, 36 nt, Artificial Sequence
  Description of Artificial Sequence:  Enzymatic Nucleic Acid
accugugauggcaugcacuaugcgcgggggaguccc

SEQ ID NO: 4365 - RNA, 36 nt, Artificial Sequence
  Description of Artificial Sequence:  Enzymatic Nucleic Acid
cggggugauggcaugcacuaugcgcgaaccugcggg

SEQ ID NO: 4366 - RNA, 36 nt, Artificial Sequence
  Description of Artificial Sequence:  Enzymatic Nucleic Acid
gcaggugauggcaugcacuaugcgcgggggcaaccu

SEQ ID NO: 4367 - RNA, 36 nt, Artificial Sequence
  Description of Artificial Sequence:  Enzymatic Nucleic Acid
uggggugauggcaugcacuaugcgcgaggcggggca

SEQ ID NO: 4368 - RNA, 36 nt, Artificial Sequence
  Description of Artificial Sequence:  Enzymatic Nucleic Acid
aguagugauggcaugcacuaugcgcggcuggggcag

SEQ ID NO: 4369 - RNA, 36 nt, Artificial Sequence
  Description of Artificial Sequence:  Enzymatic Nucleic Acid
ggccgugauggcaugcacuaugcgcgauuugccagu

SEQ ID NO: 4370 - RNA, 36 nt, Artificial Sequence
  Description of Artificial Sequence:  Enzymatic Nucleic Acid
agaaaugauggcaugcacuaugcgcgaggggccgca

SEQ ID NO: 4371 - RNA, 36 nt, Artificial Sequence
  Description of Artificial Sequence:  Enzymatic Nucleic Acid
ccaagugauggcaugcacuaugcgcgagcuccagaa

SEQ ID NO: 4372 - RNA, 36 nt, Artificial Sequence
  Description of Artificial Sequence:  Enzymatic Nucleic Acid
cugcgugauggcaugcacuaugcgcggugguuccca

SEQ ID NO: 4373 - RNA, 36 nt, Artificial Sequence
  Description of Artificial Sequence:  Enzymatic Nucleic Acid
cacugugauggcaugcacuaugcgcggcgugguucc

SEQ ID NO: 4374 - RNA, 36 nt, Artificial Sequence
  Description of Artificial Sequence:  Enzymatic Nucleic Acid
aggggugauggcaugcacuaugcgcgacugcgcgug

SEQ ID NO: 4375 - RNA, 36 nt, Artificial Sequence
  Description of Artificial Sequence:  Enzymatic Nucleic Acid
aggagugauggcaugcacuaugcgcgaccccguagg

SEQ ID NO: 4376 - RNA, 36 nt, Artificial Sequence
  Description of Artificial Sequence:  Enzymatic Nucleic Acid
cagugugauggcaugcacuaugcgcggucuugagga

SEQ ID NO: 4377 - RNA, 36 nt, Artificial Sequence
  Description of Artificial Sequence:  Enzymatic Nucleic Acid
gcgggugauggcaugcacuaugcgcgagugcgucuu

SEQ ID NO: 4378 - RNA, 36 nt, Artificial Sequence
  Description of Artificial Sequence:  Enzymatic Nucleic Acid
cgcagugauggcaugcacuaugcgcggggcagugcg

SEQ ID NO: 4379 - RNA, 36 nt, Artificial Sequence
  Description of Artificial Sequence:  Enzymatic Nucleic Acid
gcucgugauggcaugcacuaugcgcgagcgggcagu

SEQ ID NO: 4380 - RNA, 36 nt, Artificial Sequence
  Description of Artificial Sequence:  Enzymatic Nucleic Acid
cagcuugauggcaugcacuaugcgcggcagcgggca

SEQ ID NO: 4381 - RNA, 36 nt, Artificial Sequence
  Description of Artificial Sequence:  Enzymatic Nucleic Acid
gaccgugauggcaugcacuaugcgcgagcucgcagc

SEQ ID NO: 4382 - RNA, 36 nt, Artificial Sequence
  Description of Artificial Sequence:  Enzymatic Nucleic Acid
acagaugauggcaugcacuaugcgcgaccggcugcu

SEQ ID NO: 4383 - RNA, 36 nt, Artificial Sequence
  Description of Artificial Sequence:  Enzymatic Nucleic Acid
gggcaugauggcaugcacuaugcgcgagacaccggc

SEQ ID NO: 4384 - RNA, 36 nt, Artificial Sequence
  Description of Artificial Sequence:  Enzymatic Nucleic Acid
ccgggugauggcaugcacuaugcgcgacagacaccg

SEQ ID NO: 4385 - RNA, 36 nt, Artificial Sequence
  Description of Artificial Sequence:  Enzymatic Nucleic Acid
cgccaugauggcaugcacuaugcgcgagagcccugg

SEQ ID NO: 4386 - RNA, 36 nt, Artificial Sequence
  Description of Artificial Sequence:  Enzymatic Nucleic Acid
cuccuugauggcaugcacuaugcgcggggggccgcc

SEQ ID NO: 4387 - RNA, 36 nt, Artificial Sequence
  Description of Artificial Sequence:  Enzymatic Nucleic Acid
ccaggugauggcaugcacuaugcgcggacggggguc

SEQ ID NO: 4388 - RNA, 36 nt, Artificial Sequence
  Description of Artificial Sequence:  Enzymatic Nucleic Acid
agcugugauggcaugcacuaugcgcgaccaggcgac

SEQ ID NO: 4389 - RNA, 36 nt, Artificial Sequence
  Description of Artificial Sequence:  Enzymatic Nucleic Acid
cggagugauggcaugcacuaugcgcgagcugcacca

SEQ ID NO: 4390 - RNA, 36 nt, Artificial Sequence
  Description of Artificial Sequence:  Enzymatic Nucleic Acid
gcuggugauggcaugcacuaugcgcgggagcagcug

SEQ ID NO: 4391 - RNA, 36 nt, Artificial Sequence
  Description of Artificial Sequence:  Enzymatic Nucleic Acid
ccguaugauggcaugcacuaugcgcgaccugccagg

SEQ ID NO: 4392 - RNA, 36 nt, Artificial Sequence
  Description of Artificial Sequence:  Enzymatic Nucleic Acid
gcccgugauggcaugcacuaugcgcgacgaagccgu

SEQ ID NO: 4393 - RNA, 36 nt, Artificial Sequence
  Description of Artificial Sequence:  Enzymatic Nucleic Acid
gcaggugauggcaugcacuaugcgcgaggcccgcac

SEQ ID NO: 4394 - RNA, 36 nt, Artificial Sequence
  Description of Artificial Sequence:  Enzymatic Nucleic Acid
cggcgugauggcaugcacuaugcgcgaggcaggccc

SEQ ID NO: 4395 - RNA, 36 nt, Artificial Sequence
  Description of Artificial Sequence:  Enzymatic Nucleic Acid
gccggugauggcaugcacuaugcgcggcaggcaggc

SEQ ID NO: 4396 - RNA, 36 nt, Artificial Sequence
  Description of Artificial Sequence:  Enzymatic Nucleic Acid
gggggugauggcaugcacuaugcgcgaccagccggc

SEQ ID NO: 4397 - RNA, 36 nt, Artificial Sequence
  Description of Artificial Sequence:  Enzymatic Nucleic Acid
gcguuugauggcaugcacuaugcgcgguugugccug

SEQ ID NO: 4398 - RNA, 36 nt, Artificial Sequence
  Description of Artificial Sequence:  Enzymatic Nucleic Acid
agcggugauggcaugcacuaugcgcgguucguugug

SEQ ID NO: 4399 - RNA, 36 nt, Artificial Sequence
  Description of Artificial Sequence:  Enzymatic Nucleic Acid
ggaagugauggcaugcacuaugcgcgggcguucguu

SEQ ID NO: 4400 - RNA, 36 nt, Artificial Sequence
  Description of Artificial Sequence:  Enzymatic Nucleic Acid
cuuggugauggcaugcacuaugcgcgaugcuucccc

SEQ ID NO: 4401 - RNA, 36 nt, Artificial Sequence
  Description of Artificial Sequence:  Enzymatic Nucleic Acid
ugcagugauggcaugcacuaugcgcggagagcuugg

SEQ ID NO: 4402 - RNA, 36 nt, Artificial Sequence
  Description of Artificial Sequence:  Enzymatic Nucleic Acid
uccugugauggcaugcacuaugcgcgagcgagagcu

SEQ ID NO: 4403 - RNA, 36 nt, Artificial Sequence
  Description of Artificial Sequence:  Enzymatic Nucleic Acid
cacguugauggcaugcacuaugcgcgagcuccugca

SEQ ID NO: 4404 - RNA, 36 nt, Artificial Sequence
  Description of Artificial Sequence:  Enzymatic Nucleic Acid
acgcuugauggcaugcacuaugcgcgaucuuccacg

SEQ ID NO: 4405 - RNA, 36 nt, Artificial Sequence
  Description of Artificial Sequence:  Enzymatic Nucleic Acid
ucccgugauggcaugcacuaugcgcgacgcucaucu

SEQ ID NO: 4406 - RNA, 36 nt, Artificial Sequence
  Description of Artificial Sequence:  Enzymatic Nucleic Acid
aagcgugauggcaugcacuaugcgcgagucccgcac

SEQ ID NO: 4407 - RNA, 36 nt, Artificial Sequence
  Description of Artificial Sequence:  Enzymatic Nucleic Acid
ccaagugauggcaugcacuaugcgcggcagucccgc

SEQ ID NO: 4408 - RNA, 36 nt, Artificial Sequence
  Description of Artificial Sequence:  Enzymatic Nucleic Acid
cugcgugauggcaugcacuaugcgcgagccaagcgc

SEQ ID NO: 4409 - RNA, 36 nt, Artificial Sequence
  Description of Artificial Sequence:  Enzymatic Nucleic Acid
uccugugauggcaugcacuaugcgcggcagccaagc

SEQ ID NO: 4410 - RNA, 36 nt, Artificial Sequence
  Description of Artificial Sequence:  Enzymatic Nucleic Acid
gaacaugauggcaugcacuaugcgcgagccaacccc

SEQ ID NO: 4411 - RNA, 36 nt, Artificial Sequence
  Description of Artificial Sequence:  Enzymatic Nucleic Acid
cggaaugauggcaugcacuaugcgcgacagccaacc

SEQ ID NO: 4412 - RNA, 36 nt, Artificial Sequence
  Description of Artificial Sequence:  Enzymatic Nucleic Acid
cucugugauggcaugcacuaugcgcgggccggaaca

SEQ ID NO: 4413 - RNA, 36 nt, Artificial Sequence
  Description of Artificial Sequence:  Enzymatic Nucleic Acid
ucacgugauggcaugcacuaugcgcgagacggugcu

SEQ ID NO: 4414 - RNA, 36 nt, Artificial Sequence
  Description of Artificial Sequence:  Enzymatic Nucleic Acid
cuccuugauggcaugcacuaugcgcgacgcagacgg

SEQ ID NO: 4415 - RNA, 36 nt, Artificial Sequence
  Description of Artificial Sequence:  Enzymatic Nucleic Acid
cagugugauggcaugcacuaugcgcgaggaacuugg

SEQ ID NO: 4416 - RNA, 36 nt, Artificial Sequence
  Description of Artificial Sequence:  Enzymatic Nucleic Acid
cucauugauggcaugcacuaugcgcgagccagugca

SEQ ID NO: 4417 - RNA, 36 nt, Artificial Sequence
  Description of Artificial Sequence:  Enzymatic Nucleic Acid
acacuugauggcaugcacuaugcgcgaucagccagu

SEQ ID NO: 4418 - RNA, 36 nt, Artificial Sequence
  Description of Artificial Sequence:  Enzymatic Nucleic Acid
guacaugauggcaugcacuaugcgcgacucaucagc

SEQ ID NO: 4419 - RNA, 36 nt, Artificial Sequence
  Description of Artificial Sequence:  Enzymatic Nucleic Acid
acguaugauggcaugcacuaugcgcgacacucauca

SEQ ID NO: 4420 - RNA, 36 nt, Artificial Sequence
  Description of Artificial Sequence:  Enzymatic Nucleic Acid
cagcuugauggcaugcacuaugcgcggacgacguac

SEQ ID NO: 4421 - RNA, 36 nt, Artificial Sequence
  Description of Artificial Sequence:  Enzymatic Nucleic Acid
cugagugauggcaugcacuaugcgcgagcucgacga

SEQ ID NO: 4422 - RNA, 36 nt, Artificial Sequence
  Description of Artificial Sequence:  Enzymatic Nucleic Acid
cgugaugauggcaugcacuaugcgcgauaaaagaaa

SEQ ID NO: 4423 - RNA, 36 nt, Artificial Sequence
  Description of Artificial Sequence:  Enzymatic Nucleic Acid
ccagaugauggcaugcacuaugcgcgacucuuccgg

SEQ ID NO: 4424 - RNA, 36 nt, Artificial Sequence
  Description of Artificial Sequence:  Enzymatic Nucleic Acid
cuuugugauggcaugcacuaugcgcgaacuugcucc

SEQ ID NO: 4425 - RNA, 36 nt, Artificial Sequence
  Description of Artificial Sequence:  Enzymatic Nucleic Acid
cucuuugauggcaugcacuaugcgcgaagugcuguc

SEQ ID NO: 4426 - RNA, 36 nt, Artificial Sequence
  Description of Artificial Sequence:  Enzymatic Nucleic Acid
agcugugauggcaugcacuaugcgcgacccucuuca

SEQ ID NO: 4427 - RNA, 36 nt, Artificial Sequence
  Description of Artificial Sequence:  Enzymatic Nucleic Acid
ucccgugauggcaugcacuaugcgcgagcugcaccc

SEQ ID NO: 4428 - RNA, 36 nt, Artificial Sequence
  Description of Artificial Sequence:  Enzymatic Nucleic Acid
uccgaugauggcaugcacuaugcgcgagcucccgca

SEQ ID NO: 4429 - RNA, 36 nt, Artificial Sequence
  Description of Artificial Sequence:  Enzymatic Nucleic Acid
cagggugauggcaugcacuaugcgcggggccuggcu

SEQ ID NO: 4430 - RNA, 36 nt, Artificial Sequence
  Description of Artificial Sequence:  Enzymatic Nucleic Acid
gucagugauggcaugcacuaugcgcgagggcgggcc

SEQ ID NO: 4431 - RNA, 36 nt, Artificial Sequence
  Description of Artificial Sequence:  Enzymatic Nucleic Acid
gacguugauggcaugcacuaugcgcgagcagggcgg

SEQ ID NO: 4432 - RNA, 36 nt, Artificial Sequence
  Description of Artificial Sequence:  Enzymatic Nucleic Acid
ugaagugauggcaugcacuaugcgcgggagucugga

SEQ ID NO: 4433 - RNA, 36 nt, Artificial Sequence
  Description of Artificial Sequence:  Enzymatic Nucleic Acid
cccguugauggcaugcacuaugcgcgaggcuugggg

SEQ ID NO: 4434 - RNA, 36 nt, Artificial Sequence
  Description of Artificial Sequence:  Enzymatic Nucleic Acid
ggccgugauggcaugcacuaugcgcgagcccgucag

SEQ ID NO: 4435 - RNA, 36 nt, Artificial Sequence
  Description of Artificial Sequence:  Enzymatic Nucleic Acid
acaauugauggcaugcacuaugcgcgggccgcagcc

SEQ ID NO: 4436 - RNA, 36 nt, Artificial Sequence
  Description of Artificial Sequence:  Enzymatic Nucleic Acid
guucaugauggcaugcacuaugcgcgaaucggccgc

SEQ ID NO: 4437 - RNA, 36 nt, Artificial Sequence
  Description of Artificial Sequence:  Enzymatic Nucleic Acid
auguuugauggcaugcacuaugcgcgacaaucggcc

SEQ ID NO: 4438 - RNA, 36 nt, Artificial Sequence
  Description of Artificial Sequence:  Enzymatic Nucleic Acid
cucugugauggcaugcacuaugcgcgggaacguucu

SEQ ID NO: 4439 - RNA, 36 nt, Artificial Sequence
  Description of Artificial Sequence:  Enzymatic Nucleic Acid
acgcuugauggcaugcacuaugcgcgggcccucuuu

SEQ ID NO: 4440 - RNA, 36 nt, Artificial Sequence
  Description of Artificial Sequence:  Enzymatic Nucleic Acid
acccuugauggcaugcacuaugcgcggaggugagac

SEQ ID NO: 4441 - RNA, 36 nt, Artificial Sequence
  Description of Artificial Sequence:  Enzymatic Nucleic Acid
gccuuugauggcaugcacuaugcgcgacccucgagg

SEQ ID NO: 4442 - RNA, 36 nt, Artificial Sequence
  Description of Artificial Sequence:  Enzymatic Nucleic Acid
cugaaugauggcaugcacuaugcgcgagugccuuca

SEQ ID NO: 4443 - RNA, 36 nt, Artificial Sequence
  Description of Artificial Sequence:  Enzymatic Nucleic Acid
uugagugauggcaugcacuaugcgcgacgcugaaca

SEQ ID NO: 4444 - RNA, 36 nt, Artificial Sequence
  Description of Artificial Sequence:  Enzymatic Nucleic Acid
ccgcuugauggcaugcacuaugcgcgguaguugagc

SEQ ID NO: 4445 - RNA, 36 nt, Artificial Sequence
  Description of Artificial Sequence:  Enzymatic Nucleic Acid
cgccgugauggcaugcacuaugcgcggcccgcucgu

SEQ ID NO: 4446 - RNA, 36 nt, Artificial Sequence
  Description of Artificial Sequence:  Enzymatic Nucleic Acid
cggggugauggcaugcacuaugcgcggccgcgcccg

SEQ ID NO: 4447 - RNA, 36 nt, Artificial Sequence
  Description of Artificial Sequence:  Enzymatic Nucleic Acid
agaggugauggcaugcacuaugcgcggcccaggagg

SEQ ID NO: 4448 - RNA, 36 nt, Artificial Sequence
  Description of Artificial Sequence:  Enzymatic Nucleic Acid
cagcaugauggcaugcacuaugcgcgagaggcgccc

SEQ ID NO: 4449 - RNA, 36 nt, Artificial Sequence
  Description of Artificial Sequence:  Enzymatic Nucleic Acid
cccagugauggcaugcacuaugcgcgacagaggcgc

SEQ ID NO: 4450 - RNA, 36 nt, Artificial Sequence
  Description of Artificial Sequence:  Enzymatic Nucleic Acid
gauauugauggcaugcacuaugcgcgguccaggccc

SEQ ID NO: 4451 - RNA, 36 nt, Artificial Sequence
  Description of Artificial Sequence:  Enzymatic Nucleic Acid
aggugugauggcaugcacuaugcgcggccaggcccu

SEQ ID NO: 4452 - RNA, 36 nt, Artificial Sequence
  Description of Artificial Sequence:  Enzymatic Nucleic Acid
cgcagugauggcaugcacuaugcgcgacgaaggugc

SEQ ID NO: 4453 - RNA, 36 nt, Artificial Sequence
  Description of Artificial Sequence:  Enzymatic Nucleic Acid
acacgugauggcaugcacuaugcgcgagcacgaagg

SEQ ID NO: 4454 - RNA, 36 nt, Artificial Sequence
  Description of Artificial Sequence:  Enzymatic Nucleic Acid
ccgcaugauggcaugcacuaugcgcgacgcagcacg

SEQ ID NO: 4455 - RNA, 36 nt, Artificial Sequence
  Description of Artificial Sequence:  Enzymatic Nucleic Acid
gcccgugauggcaugcacuaugcgcgacacgcagca

SEQ ID NO: 4456 - RNA, 36 nt, Artificial Sequence
  Description of Artificial Sequence:  Enzymatic Nucleic Acid
ggcggugauggcaugcacuaugcgcgggguccuggg

SEQ ID NO: 4457 - RNA, 36 nt, Artificial Sequence
  Description of Artificial Sequence:  Enzymatic Nucleic Acid
ucaggugauggcaugcacuaugcgcgggcggguccu

SEQ ID NO: 4458 - RNA, 36 nt, Artificial Sequence
  Description of Artificial Sequence:  Enzymatic Nucleic Acid
cagcuugauggcaugcacuaugcgcgaggcggcggg

SEQ ID NO: 4459 - RNA, 36 nt, Artificial Sequence
  Description of Artificial Sequence:  Enzymatic Nucleic Acid
aaguaugauggcaugcacuaugcgcgagcucaggcg

SEQ ID NO: 4460 - RNA, 36 nt, Artificial Sequence
  Description of Artificial Sequence:  Enzymatic Nucleic Acid
cuugaugauggcaugcacuaugcgcgaaaguacagc

SEQ ID NO: 4461 - RNA, 36 nt, Artificial Sequence
  Description of Artificial Sequence:  Enzymatic Nucleic Acid
cgucaugauggcaugcacuaugcgcgauccaccuug

SEQ ID NO: 4462 - RNA, 36 nt, Artificial Sequence
  Description of Artificial Sequence:  Enzymatic Nucleic Acid
cccguugauggcaugcacuaugcgcgacauccaccu

SEQ ID NO: 4463 - RNA, 36 nt, Artificial Sequence
  Description of Artificial Sequence:  Enzymatic Nucleic Acid
guacgugauggcaugcacuaugcgcggcccgucaca

SEQ ID NO: 4464 - RNA, 36 nt, Artificial Sequence
  Description of Artificial Sequence:  Enzymatic Nucleic Acid
gguguugauggcaugcacuaugcgcgguacgcgccc

SEQ ID NO: 4465 - RNA, 36 nt, Artificial Sequence
  Description of Artificial Sequence:  Enzymatic Nucleic Acid
gcuggugauggcaugcacuaugcgcggaugaccucc

SEQ ID NO: 4466 - RNA, 36 nt, Artificial Sequence
  Description of Artificial Sequence:  Enzymatic Nucleic Acid
gcacgugauggcaugcacuaugcgcgaguacguguu

SEQ ID NO: 4467 - RNA, 36 nt, Artificial Sequence
  Description of Artificial Sequence:  Enzymatic Nucleic Acid
cgacgugauggcaugcacuaugcgcgacgcaguacg

SEQ ID NO: 4468 - RNA, 36 nt, Artificial Sequence
  Description of Artificial Sequence:  Enzymatic Nucleic Acid
cacggugauggcaugcacuaugcgcgauaccgacgc

SEQ ID NO: 4469 - RNA, 36 nt, Artificial Sequence
  Description of Artificial Sequence:  Enzymatic Nucleic Acid
augggugauggcaugcacuaugcgcgggccuucugg

SEQ ID NO: 4470 - RNA, 36 nt, Artificial Sequence
  Description of Artificial Sequence:  Enzymatic Nucleic Acid
ccuugugauggcaugcacuaugcgcgggacgugccc

SEQ ID NO: 4471 - RNA, 36 nt, Artificial Sequence
  Description of Artificial Sequence:  Enzymatic Nucleic Acid
ucuguugauggcaugcacuaugcgcgaagguagaga

SEQ ID NO: 4472 - RNA, 36 nt, Artificial Sequence
  Description of Artificial Sequence:  Enzymatic Nucleic Acid
ugucgugauggcaugcacuaugcgcgauguacggcu

SEQ ID NO: 4473 - RNA, 36 nt, Artificial Sequence
  Description of Artificial Sequence:  Enzymatic Nucleic Acid
acuguugauggcaugcacuaugcgcggcauguacgg

SEQ ID NO: 4474 - RNA, 36 nt, Artificial Sequence
  Description of Artificial Sequence:  Enzymatic Nucleic Acid
uccugugauggcaugcacuaugcgcgaggugagcca

SEQ ID NO: 4475 - RNA, 36 nt, Artificial Sequence
  Description of Artificial Sequence:  Enzymatic Nucleic Acid
cucagugauggcaugcacuaugcgcggggcuggucu

SEQ ID NO: 4476 - RNA, 36 nt, Artificial Sequence
  Description of Artificial Sequence:  Enzymatic Nucleic Acid
ucccuugauggcaugcacuaugcgcgagcgggcugg

SEQ ID NO: 4477 - RNA, 36 nt, Artificial Sequence
  Description of Artificial Sequence:  Enzymatic Nucleic Acid
gacggugauggcaugcacuaugcgcgaucccucagc

SEQ ID NO: 4478 - RNA, 36 nt, Artificial Sequence
  Description of Artificial Sequence:  Enzymatic Nucleic Acid
cugcuugauggcaugcacuaugcgcggaugacgacg

SEQ ID NO: 4479 - RNA, 36 nt, Artificial Sequence
  Description of Artificial Sequence:  Enzymatic Nucleic Acid
ucauuugauggcaugcacuaugcgcgagggaggagc

SEQ ID NO: 4480 - RNA, 36 nt, Artificial Sequence
  Description of Artificial Sequence:  Enzymatic Nucleic Acid
ggccuugauggcaugcacuaugcgcgauucagggag

SEQ ID NO: 4481 - RNA, 36 nt, Artificial Sequence
  Description of Artificial Sequence:  Enzymatic Nucleic Acid
gacguugauggcaugcacuaugcgcggaagaggcca

SEQ ID NO: 4482 - RNA, 36 nt, Artificial Sequence
  Description of Artificial Sequence:  Enzymatic Nucleic Acid
ugaagugauggcaugcacuaugcgcgguaggaagac

SEQ ID NO: 4483 - RNA, 36 nt, Artificial Sequence
  Description of Artificial Sequence:  Enzymatic Nucleic Acid
uggcaugauggcaugcacuaugcgcgaugaagcgua

SEQ ID NO: 4484 - RNA, 36 nt, Artificial Sequence
  Description of Artificial Sequence:  Enzymatic Nucleic Acid
gguggugauggcaugcacuaugcgcgacaugaagcg

SEQ ID NO: 4485 - RNA, 36 nt, Artificial Sequence
  Description of Artificial Sequence:  Enzymatic Nucleic Acid
cacggugauggcaugcacuaugcgcggugguggcac

SEQ ID NO: 4486 - RNA, 36 nt, Artificial Sequence
  Description of Artificial Sequence:  Enzymatic Nucleic Acid
augcgugauggcaugcacuaugcgcgacggcguggu

SEQ ID NO: 4487 - RNA, 36 nt, Artificial Sequence
  Description of Artificial Sequence:  Enzymatic Nucleic Acid
ugaugugauggcaugcacuaugcgcggcacggcgug

SEQ ID NO: 4488 - RNA, 36 nt, Artificial Sequence
  Description of Artificial Sequence:  Enzymatic Nucleic Acid
ccuggugauggcaugcacuaugcgcgacuggacgua

SEQ ID NO: 4489 - RNA, 36 nt, Artificial Sequence
  Description of Artificial Sequence:  Enzymatic Nucleic Acid
cccugugauggcaugcacuaugcgcggggauccccu

SEQ ID NO: 4490 - RNA, 36 nt, Artificial Sequence
  Description of Artificial Sequence:  Enzymatic Nucleic Acid
agcagugauggcaugcacuaugcgcgguggagagga

SEQ ID NO: 4491 - RNA, 36 nt, Artificial Sequence
  Description of Artificial Sequence:  Enzymatic Nucleic Acid
cagagugauggcaugcacuaugcgcgagcguggaga

SEQ ID NO: 4492 - RNA, 36 nt, Artificial Sequence
  Description of Artificial Sequence:  Enzymatic Nucleic Acid
ggcugugauggcaugcacuaugcgcgagagcagcgu

SEQ ID NO: 4493 - RNA, 36 nt, Artificial Sequence
  Description of Artificial Sequence:  Enzymatic Nucleic Acid
uagcaugauggcaugcacuaugcgcgaggcugcaga

SEQ ID NO: 4494 - RNA, 36 nt, Artificial Sequence
  Description of Artificial Sequence:  Enzymatic Nucleic Acid
cguagugauggcaugcacuaugcgcgacaggcugca

SEQ ID NO: 4495 - RNA, 36 nt, Artificial Sequence
  Description of Artificial Sequence:  Enzymatic Nucleic Acid
cauguugauggcaugcacuaugcgcggccguagcac

SEQ ID NO: 4496 - RNA, 36 nt, Artificial Sequence
  Description of Artificial Sequence:  Enzymatic Nucleic Acid
gcaaaugauggcaugcacuaugcgcgagcuuguucu

SEQ ID NO: 4497 - RNA, 36 nt, Artificial Sequence
  Description of Artificial Sequence:  Enzymatic Nucleic Acid
ccccgugauggcaugcacuaugcgcgaaacagcuug

SEQ ID NO: 4498 - RNA, 36 nt, Artificial Sequence
  Description of Artificial Sequence:  Enzymatic Nucleic Acid
aggagugauggcaugcacuaugcgcgagcccguccc

SEQ ID NO: 4499 - RNA, 36 nt, Artificial Sequence
  Description of Artificial Sequence:  Enzymatic Nucleic Acid
aaacgugauggcaugcacuaugcgcgaggagcagcc

SEQ ID NO: 4500 - RNA, 36 nt, Artificial Sequence
  Description of Artificial Sequence:  Enzymatic Nucleic Acid
gaaauugauggcaugcacuaugcgcgauccaccaaa

SEQ ID NO: 4501 - RNA, 36 nt, Artificial Sequence
  Description of Artificial Sequence:  Enzymatic Nucleic Acid
accaaugauggcaugcacuaugcgcgaagaaaucau

SEQ ID NO: 4502 - RNA, 36 nt, Artificial Sequence
  Description of Artificial Sequence:  Enzymatic Nucleic Acid
gguguugauggcaugcacuaugcgcgaccaacaaga

SEQ ID NO: 4503 - RNA, 36 nt, Artificial Sequence
  Description of Artificial Sequence:  Enzymatic Nucleic Acid
uuucgugauggcaugcacuaugcgcggugggugagg

SEQ ID NO: 4504 - RNA, 36 nt, Artificial Sequence
  Description of Artificial Sequence:  Enzymatic Nucleic Acid
guuuuugauggcaugcacuaugcgcggcguggguga

SEQ ID NO: 4505 - RNA, 36 nt, Artificial Sequence
  Description of Artificial Sequence:  Enzymatic Nucleic Acid
caccuugauggcaugcacuaugcgcgggaccagggu

SEQ ID NO: 4506 - RNA, 36 nt, Artificial Sequence
  Description of Artificial Sequence:  Enzymatic Nucleic Acid
agggaugauggcaugcacuaugcgcgaccucggacc

SEQ ID NO: 4507 - RNA, 36 nt, Artificial Sequence
  Description of Artificial Sequence:  Enzymatic Nucleic Acid
auacuugauggcaugcacuaugcgcgagggacaccu

SEQ ID NO: 4508 - RNA, 36 nt, Artificial Sequence
  Description of Artificial Sequence:  Enzymatic Nucleic Acid
ccacgugauggcaugcacuaugcgcgagccauacuc

SEQ ID NO: 4509 - RNA, 36 nt, Artificial Sequence
  Description of Artificial Sequence:  Enzymatic Nucleic Acid
aaguuugauggcaugcacuaugcgcgaccacgcagc

SEQ ID NO: 4510 - RNA, 36 nt, Artificial Sequence
  Description of Artificial Sequence:  Enzymatic Nucleic Acid
uuccgugauggcaugcacuaugcgcgaaguucacca

SEQ ID NO: 4511 - RNA, 36 nt, Artificial Sequence
  Description of Artificial Sequence:  Enzymatic Nucleic Acid
aaguuugauggcaugcacuaugcgcgaccacugucu

SEQ ID NO: 4512 - RNA, 36 nt, Artificial Sequence
  Description of Artificial Sequence:  Enzymatic Nucleic Acid
uucuaugauggcaugcacuaugcgcgagggaaguuc

SEQ ID NO: 4513 - RNA, 36 nt, Artificial Sequence
  Description of Artificial Sequence:  Enzymatic Nucleic Acid
ggccuugauggcaugcacuaugcgcggucuucuaca

SEQ ID NO: 4514 - RNA, 36 nt, Artificial Sequence
  Description of Artificial Sequence:  Enzymatic Nucleic Acid
cugaaugauggcaugcacuaugcgcgaaaagccgug

SEQ ID NO: 4515 - RNA, 36 nt, Artificial Sequence
  Description of Artificial Sequence:  Enzymatic Nucleic Acid
gccggugauggcaugcacuaugcgcgaucugaacaa

SEQ ID NO: 4516 - RNA, 36 nt, Artificial Sequence
  Description of Artificial Sequence:  Enzymatic Nucleic Acid
ggccgugauggcaugcacuaugcgcgaccaggggaa

SEQ ID NO: 4517 - RNA, 36 nt, Artificial Sequence
  Description of Artificial Sequence:  Enzymatic Nucleic Acid
agcagugauggcaugcacuaugcgcgaggccgcacc

SEQ ID NO: 4518 - RNA, 36 nt, Artificial Sequence
  Description of Artificial Sequence:  Enzymatic Nucleic Acid
uccagugauggcaugcacuaugcgcgagcaggccgc

SEQ ID NO: 4519 - RNA, 36 nt, Artificial Sequence
  Description of Artificial Sequence:  Enzymatic Nucleic Acid
cucugugauggcaugcacuaugcgcgaccuccaggg

SEQ ID NO: 4520 - RNA, 36 nt, Artificial Sequence
  Description of Artificial Sequence:  Enzymatic Nucleic Acid
guaguugauggcaugcacuaugcgcggcucugcacc

SEQ ID NO: 4521 - RNA, 36 nt, Artificial Sequence
  Description of Artificial Sequence:  Enzymatic Nucleic Acid
ccgggugauggcaugcacuaugcgcgauagcuggag

SEQ ID NO: 4522 - RNA, 36 nt, Artificial Sequence
  Description of Artificial Sequence:  Enzymatic Nucleic Acid
agccgugauggcaugcacuaugcgcggguugaaggu

SEQ ID NO: 4523 - RNA, 36 nt, Artificial Sequence
  Description of Artificial Sequence:  Enzymatic Nucleic Acid
cgacgugauggcaugcacuaugcgcgauguuccucc

SEQ ID NO: 4524 - RNA, 36 nt, Artificial Sequence
  Description of Artificial Sequence:  Enzymatic Nucleic Acid
guuugugauggcaugcacuaugcgcggacgcauguu

SEQ ID NO: 4525 - RNA, 36 nt, Artificial Sequence
  Description of Artificial Sequence:  Enzymatic Nucleic Acid
agccgugauggcaugcacuaugcgcgaagaccccaa

SEQ ID NO: 4526 - RNA, 36 nt, Artificial Sequence
  Description of Artificial Sequence:  Enzymatic Nucleic Acid
cacuuugauggcaugcacuaugcgcgagccgcaaga

SEQ ID NO: 4527 - RNA, 36 nt, Artificial Sequence
  Description of Artificial Sequence:  Enzymatic Nucleic Acid
ugugaugauggcaugcacuaugcgcgacuucagccg

SEQ ID NO: 4528 - RNA, 36 nt, Artificial Sequence
  Description of Artificial Sequence:  Enzymatic Nucleic Acid
agaaaugauggcaugcacuaugcgcgaggcugugac

SEQ ID NO: 4529 - RNA, 36 nt, Artificial Sequence
  Description of Artificial Sequence:  Enzymatic Nucleic Acid
accugugauggcaugcacuaugcgcgaaauccagaa

SEQ ID NO: 4530 - RNA, 36 nt, Artificial Sequence
  Description of Artificial Sequence:  Enzymatic Nucleic Acid
cuguuugauggcaugcacuaugcgcgaccugcaaau

SEQ ID NO: 4531 - RNA, 36 nt, Artificial Sequence
  Description of Artificial Sequence:  Enzymatic Nucleic Acid
gugcaugauggcaugcacuaugcgcgaccgucugga

SEQ ID NO: 4532 - RNA, 36 nt, Artificial Sequence
  Description of Artificial Sequence:  Enzymatic Nucleic Acid
uggugugauggcaugcacuaugcgcgacaccgucug

SEQ ID NO: 4533 - RNA, 36 nt, Artificial Sequence
  Description of Artificial Sequence:  Enzymatic Nucleic Acid
ugcagugauggcaugcacuaugcgcgaggaggaucu

SEQ ID NO: 4534 - RNA, 36 nt, Artificial Sequence
  Description of Artificial Sequence:  Enzymatic Nucleic Acid
gccugugauggcaugcacuaugcgcgagcaggagga

SEQ ID NO: 4535 - RNA, 36 nt, Artificial Sequence
  Description of Artificial Sequence:  Enzymatic Nucleic Acid
acaugugauggcaugcacuaugcgcggugaaaccug

SEQ ID NO: 4536 - RNA, 36 nt, Artificial Sequence
  Description of Artificial Sequence:  Enzymatic Nucleic Acid
gcacaugauggcaugcacuaugcgcgaugcgugaaa

SEQ ID NO: 4537 - RNA, 36 nt, Artificial Sequence
  Description of Artificial Sequence:  Enzymatic Nucleic Acid
cagcaugauggcaugcacuaugcgcgacaugcguga

SEQ ID NO: 4538 - RNA, 36 nt, Artificial Sequence
  Description of Artificial Sequence:  Enzymatic Nucleic Acid
ugcagugauggcaugcacuaugcgcgacacaugcgu

SEQ ID NO: 4539 - RNA, 36 nt, Artificial Sequence
  Description of Artificial Sequence:  Enzymatic Nucleic Acid
agcugugauggcaugcacuaugcgcgagcacacaug

SEQ ID NO: 4540 - RNA, 36 nt, Artificial Sequence
  Description of Artificial Sequence:  Enzymatic Nucleic Acid
acgcgugauggcaugcacuaugcgcgaggaaaaaug

SEQ ID NO: 4541 - RNA, 36 nt, Artificial Sequence
  Description of Artificial Sequence:  Enzymatic Nucleic Acid
ugacgugauggcaugcacuaugcgcggcaggaaaaa

SEQ ID NO: 4542 - RNA, 36 nt, Artificial Sequence
  Description of Artificial Sequence:  Enzymatic Nucleic Acid
cguguugauggcaugcacuaugcgcgagagaugacg

SEQ ID NO: 4543 - RNA, 36 nt, Artificial Sequence
  Description of Artificial Sequence:  Enzymatic Nucleic Acid
aguagugauggcaugcacuaugcgcgagagggaggc

SEQ ID NO: 4544 - RNA, 36 nt, Artificial Sequence
  Description of Artificial Sequence:  Enzymatic Nucleic Acid
gcuuuugauggcaugcacuaugcgcgaggauggagu

SEQ ID NO: 4545 - RNA, 36 nt, Artificial Sequence
  Description of Artificial Sequence:  Enzymatic Nucleic Acid
cccugugauggcaugcacuaugcgcgguucuuggcu

SEQ ID NO: 4546 - RNA, 36 nt, Artificial Sequence
  Description of Artificial Sequence:  Enzymatic Nucleic Acid
agcgaugauggcaugcacuaugcgcgaucccugcgu

SEQ ID NO: 4547 - RNA, 36 nt, Artificial Sequence
  Description of Artificial Sequence:  Enzymatic Nucleic Acid
cccagugauggcaugcacuaugcgcggacaucccug

SEQ ID NO: 4548 - RNA, 36 nt, Artificial Sequence
  Description of Artificial Sequence:  Enzymatic Nucleic Acid
ggcggugauggcaugcacuaugcgcggcccuuggcc

SEQ ID NO: 4549 - RNA, 36 nt, Artificial Sequence
  Description of Artificial Sequence:  Enzymatic Nucleic Acid
gccggugauggcaugcacuaugcgcgggcgcccuug

SEQ ID NO: 4550 - RNA, 36 nt, Artificial Sequence
  Description of Artificial Sequence:  Enzymatic Nucleic Acid
gagggugauggcaugcacuaugcgcgagagggccgg

SEQ ID NO: 4551 - RNA, 36 nt, Artificial Sequence
  Description of Artificial Sequence:  Enzymatic Nucleic Acid
ggccuugauggcaugcacuaugcgcgggagggcaga

SEQ ID NO: 4552 - RNA, 36 nt, Artificial Sequence
  Description of Artificial Sequence:  Enzymatic Nucleic Acid
cacugugauggcaugcacuaugcgcgacggccucgg

SEQ ID NO: 4553 - RNA, 36 nt, Artificial Sequence
  Description of Artificial Sequence:  Enzymatic Nucleic Acid
uggcaugauggcaugcacuaugcgcgagccacugca

SEQ ID NO: 4554 - RNA, 36 nt, Artificial Sequence
  Description of Artificial Sequence:  Enzymatic Nucleic Acid
gguggugauggcaugcacuaugcgcgacagccacug

SEQ ID NO: 4555 - RNA, 36 nt, Artificial Sequence
  Description of Artificial Sequence:  Enzymatic Nucleic Acid
uugagugauggcaugcacuaugcgcgaggaaugcuu

SEQ ID NO: 4556 - RNA, 36 nt, Artificial Sequence
  Description of Artificial Sequence:  Enzymatic Nucleic Acid
cgaguugauggcaugcacuaugcgcgagcuugagca

SEQ ID NO: 4557 - RNA, 36 nt, Artificial Sequence
  Description of Artificial Sequence:  Enzymatic Nucleic Acid
gguguugauggcaugcacuaugcgcggagucagcuu

SEQ ID NO: 4558 - RNA, 36 nt, Artificial Sequence
  Description of Artificial Sequence:  Enzymatic Nucleic Acid
ggugaugauggcaugcacuaugcgcgacggugucga

SEQ ID NO: 4559 - RNA, 36 nt, Artificial Sequence
  Description of Artificial Sequence:  Enzymatic Nucleic Acid
aguggugauggcaugcacuaugcgcgacguagguga

SEQ ID NO: 4560 - RNA, 36 nt, Artificial Sequence
  Description of Artificial Sequence:  Enzymatic Nucleic Acid
agcugugauggcaugcacuaugcgcggucugggcug

SEQ ID NO: 4561 - RNA, 36 nt, Artificial Sequence
  Description of Artificial Sequence:  Enzymatic Nucleic Acid
cgacuugauggcaugcacuaugcgcgagcugcgucu

SEQ ID NO: 4562 - RNA, 36 nt, Artificial Sequence
  Description of Artificial Sequence:  Enzymatic Nucleic Acid
agcguugauggcaugcacuaugcgcgguccccggga

SEQ ID NO: 4563 - RNA, 36 nt, Artificial Sequence
  Description of Artificial Sequence:  Enzymatic Nucleic Acid
gucagugauggcaugcacuaugcgcggucguccccg

SEQ ID NO: 4564 - RNA, 36 nt, Artificial Sequence
  Description of Artificial Sequence:  Enzymatic Nucleic Acid
gcaguugauggcaugcacuaugcgcgagcgucgucc

SEQ ID NO: 4565 - RNA, 36 nt, Artificial Sequence
  Description of Artificial Sequence:  Enzymatic Nucleic Acid
cagggugauggcaugcacuaugcgcgagucagcguc

SEQ ID NO: 4566 - RNA, 36 nt, Artificial Sequence
  Description of Artificial Sequence:  Enzymatic Nucleic Acid
ggcugugauggcaugcacuaugcgcgggccuccagg

SEQ ID NO: 4567 - RNA, 36 nt, Artificial Sequence
  Description of Artificial Sequence:  Enzymatic Nucleic Acid
gagggugauggcaugcacuaugcgcgagugccgggu

SEQ ID NO: 4568 - RNA, 36 nt, Artificial Sequence
  Description of Artificial Sequence:  Enzymatic Nucleic Acid
gccauugauggcaugcacuaugcgcgaguccaggau

SEQ ID NO: 4569 - RNA, 36 nt, Artificial Sequence
  Description of Artificial Sequence:  Enzymatic Nucleic Acid
gugggugauggcaugcacuaugcgcgggguggccau

SEQ ID NO: 4570 - RNA, 36 nt, Artificial Sequence
  Description of Artificial Sequence:  Enzymatic Nucleic Acid
gcucuugauggcaugcacuaugcgcgggccuggcug

SEQ ID NO: 4571 - RNA, 36 nt, Artificial Sequence
  Description of Artificial Sequence:  Enzymatic Nucleic Acid
cgugaugauggcaugcacuaugcgcgagggcugcug

SEQ ID NO: 4572 - RNA, 36 nt, Artificial Sequence
  Description of Artificial Sequence:  Enzymatic Nucleic Acid
cccggugauggcaugcacuaugcgcggugacagggc

SEQ ID NO: 4573 - RNA, 36 nt, Artificial Sequence
  Description of Artificial Sequence:  Enzymatic Nucleic Acid
cggugugauggcaugcacuaugcgcggggccugggu

SEQ ID NO: 4574 - RNA, 36 nt, Artificial Sequence
  Description of Artificial Sequence:  Enzymatic Nucleic Acid
cccagugauggcaugcacuaugcgcgggugcgggcc

SEQ ID NO: 4575 - RNA, 36 nt, Artificial Sequence
  Description of Artificial Sequence:  Enzymatic Nucleic Acid
ggccuugauggcaugcacuaugcgcgagacucccag

SEQ ID NO: 4576 - RNA, 36 nt, Artificial Sequence
  Description of Artificial Sequence:  Enzymatic Nucleic Acid
ucacuugauggcaugcacuaugcgcgaggccucaga

SEQ ID NO: 4577 - RNA, 36 nt, Artificial Sequence
  Description of Artificial Sequence:  Enzymatic Nucleic Acid
acacuugauggcaugcacuaugcgcgacucaggccu

SEQ ID NO: 4578 - RNA, 36 nt, Artificial Sequence
  Description of Artificial Sequence:  Enzymatic Nucleic Acid
ccaaaugauggcaugcacuaugcgcgacucacucag

SEQ ID NO: 4579 - RNA, 36 nt, Artificial Sequence
  Description of Artificial Sequence:  Enzymatic Nucleic Acid
ggccuugauggcaugcacuaugcgcgggccaaacac

SEQ ID NO: 4580 - RNA, 36 nt, Artificial Sequence
  Description of Artificial Sequence:  Enzymatic Nucleic Acid
acaugugauggcaugcacuaugcgcgaggccucggc

SEQ ID NO: 4581 - RNA, 36 nt, Artificial Sequence
  Description of Artificial Sequence:  Enzymatic Nucleic Acid
ccggaugauggcaugcacuaugcgcgaugcaggccu

SEQ ID NO: 4582 - RNA, 36 nt, Artificial Sequence
  Description of Artificial Sequence:  Enzymatic Nucleic Acid
gccuuugauggcaugcacuaugcgcgagccggacau

SEQ ID NO: 4583 - RNA, 36 nt, Artificial Sequence
  Description of Artificial Sequence:  Enzymatic Nucleic Acid
acacuugauggcaugcacuaugcgcgagccuucagc

SEQ ID NO: 4584 - RNA, 36 nt, Artificial Sequence
  Description of Artificial Sequence:  Enzymatic Nucleic Acid
ccggaugauggcaugcacuaugcgcgacucagccuu

SEQ ID NO: 4585 - RNA, 36 nt, Artificial Sequence
  Description of Artificial Sequence:  Enzymatic Nucleic Acid
ggccuugauggcaugcacuaugcgcgagccggacac

SEQ ID NO: 4586 - RNA, 36 nt, Artificial Sequence
  Description of Artificial Sequence:  Enzymatic Nucleic Acid
ucgcuugauggcaugcacuaugcgcgaggccucagc

SEQ ID NO: 4587 - RNA, 36 nt, Artificial Sequence
  Description of Artificial Sequence:  Enzymatic Nucleic Acid
acacuugauggcaugcacuaugcgcggcucaggccu

SEQ ID NO: 4588 - RNA, 36 nt, Artificial Sequence
  Description of Artificial Sequence:  Enzymatic Nucleic Acid
cuggaugauggcaugcacuaugcgcgacucgcucag

SEQ ID NO: 4589 - RNA, 36 nt, Artificial Sequence
  Description of Artificial Sequence:  Enzymatic Nucleic Acid
acacuugauggcaugcacuaugcgcgagcccuuggc

SEQ ID NO: 4590 - RNA, 36 nt, Artificial Sequence
  Description of Artificial Sequence:  Enzymatic Nucleic Acid
cuggaugauggcaugcacuaugcgcgacucagcccu

SEQ ID NO: 4591 - RNA, 36 nt, Artificial Sequence
  Description of Artificial Sequence:  Enzymatic Nucleic Acid
gacggugauggcaugcacuaugcgcgaggugugcug

SEQ ID NO: 4592 - RNA, 36 nt, Artificial Sequence
  Description of Artificial Sequence:  Enzymatic Nucleic Acid
ccgagugauggcaugcacuaugcgcggccagccugu

SEQ ID NO: 4593 - RNA, 36 nt, Artificial Sequence
  Description of Artificial Sequence:  Enzymatic Nucleic Acid
aauggugauggcaugcacuaugcgcggaaucugggg

SEQ ID NO: 4594 - RNA, 36 nt, Artificial Sequence
  Description of Artificial Sequence:  Enzymatic Nucleic Acid
gugaaugauggcaugcacuaugcgcgaauggcgaau

SEQ ID NO: 4595 - RNA, 36 nt, Artificial Sequence
  Description of Artificial Sequence:  Enzymatic Nucleic Acid
cagggugauggcaugcacuaugcgcggaggggugaa

SEQ ID NO: 4596 - RNA, 36 nt, Artificial Sequence
  Description of Artificial Sequence:  Enzymatic Nucleic Acid
gagggugauggcaugcacuaugcgcgagggcgaggg

SEQ ID NO: 4597 - RNA, 36 nt, Artificial Sequence
  Description of Artificial Sequence:  Enzymatic Nucleic Acid
gaaggugauggcaugcacuaugcgcgaaaggagggc

SEQ ID NO: 4598 - RNA, 36 nt, Artificial Sequence
  Description of Artificial Sequence:  Enzymatic Nucleic Acid
cuucuugauggcaugcacuaugcgcgagggucucca

SEQ ID NO: 4599 - RNA, 36 nt, Artificial Sequence
  Description of Artificial Sequence:  Enzymatic Nucleic Acid
uugguugauggcaugcacuaugcgcgacuccaaauu

SEQ ID NO: 4600 - RNA, 36 nt, Artificial Sequence
  Description of Artificial Sequence:  Enzymatic Nucleic Acid
gggcaugauggcaugcacuaugcgcgaccuuugguc

SEQ ID NO: 4601 - RNA, 36 nt, Artificial Sequence
  Description of Artificial Sequence:  Enzymatic Nucleic Acid
cagggugauggcaugcacuaugcgcgacaccuuugg

SEQ ID NO: 4602 - RNA, 36 nt, Artificial Sequence
  Description of Artificial Sequence:  Enzymatic Nucleic Acid
guguaugauggcaugcacuaugcgcgagggcacacc

SEQ ID NO: 4603 - RNA, 36 nt, Artificial Sequence
  Description of Artificial Sequence:  Enzymatic Nucleic Acid
guccuugauggcaugcacuaugcgcggccuguguac

SEQ ID NO: 4604 - RNA, 36 nt, Artificial Sequence
  Description of Artificial Sequence:  Enzymatic Nucleic Acid
aggugugauggcaugcacuaugcgcgaggguccucg

SEQ ID NO: 4605 - RNA, 36 nt, Artificial Sequence
  Description of Artificial Sequence:  Enzymatic Nucleic Acid
acccaugauggcaugcacuaugcgcgagggaccccc

SEQ ID NO: 4606 - RNA, 36 nt, Artificial Sequence
  Description of Artificial Sequence:  Enzymatic Nucleic Acid
cacagugauggcaugcacuaugcgcgaccucccccc

SEQ ID NO: 4607 - RNA, 36 nt, Artificial Sequence
  Description of Artificial Sequence:  Enzymatic Nucleic Acid
ucccaugauggcaugcacuaugcgcgagcaccuccc

SEQ ID NO: 4608 - RNA, 36 nt, Artificial Sequence
  Description of Artificial Sequence:  Enzymatic Nucleic Acid
auauuugauggcaugcacuaugcgcgaguauuuuac

SEQ ID NO: 4609 - RNA, 36 nt, Artificial Sequence
  Description of Artificial Sequence:  Enzymatic Nucleic Acid
aaacuugauggcaugcacuaugcgcgauauauucag

SEQ ID NO: 4610 - RNA, 36 nt, Artificial Sequence
  Description of Artificial Sequence:  Enzymatic Nucleic Acid
uuuuuugauggcaugcacuaugcgcgaaaacugaaa

SEQ ID NO: 4611 - DNA, 31 bp, Artificial Sequence
  Description of Artificial Sequence:  Enzymatic Nucleic Acid
caggacgcggctagctacaacgaagcgctgc

SEQ ID NO: 4612 - DNA, 31 bp, Artificial Sequence
  Description of Artificial Sequence:  Enzymatic Nucleic Acid
agcaggacggctagctacaacgagcagcgct

SEQ ID NO: 4613 - DNA, 31 bp, Artificial Sequence
  Description of Artificial Sequence:  Enzymatic Nucleic Acid
tgcgcagcggctagctacaacgaaggacgca

SEQ ID NO: 4614 - DNA, 31 bp, Artificial Sequence
  Description of Artificial Sequence:  Enzymatic Nucleic Acid
acgtgcgcggctagctacaacgaagcaggac

SEQ ID NO: 4615 - DNA, 31 bp, Artificial Sequence
  Description of Artificial Sequence:  Enzymatic Nucleic Acid
ccacgtgcggctagctacaacgagcagcagg

SEQ ID NO: 4616 - DNA, 31 bp, Artificial Sequence
  Description of Artificial Sequence:  Enzymatic Nucleic Acid
tcccacgtggctagctacaacgagcgcagca

SEQ ID NO: 4617 - DNA, 31 bp, Artificial Sequence
  Description of Artificial Sequence:  Enzymatic Nucleic Acid
cttcccacggctagctacaacgagtgcgcag

SEQ ID NO: 4618 - DNA, 31 bp, Artificial Sequence
  Description of Artificial Sequence:  Enzymatic Nucleic Acid
gccagggcggctagctacaacgattcccacg

SEQ ID NO: 4619 - DNA, 31 bp, Artificial Sequence
  Description of Artificial Sequence:  Enzymatic Nucleic Acid
gccggggcggctagctacaacgacagggctt

SEQ ID NO: 4620 - DNA, 31 bp, Artificial Sequence
  Description of Artificial Sequence:  Enzymatic Nucleic Acid
ggggtggcggctagctacaacgacggggcca

SEQ ID NO: 4621 - DNA, 31 bp, Artificial Sequence
  Description of Artificial Sequence:  Enzymatic Nucleic Acid
gcgggggtggctagctacaacgaggccgggg

SEQ ID NO: 4622 - DNA, 31 bp, Artificial Sequence
  Description of Artificial Sequence:  Enzymatic Nucleic Acid
ggcatcgcggctagctacaacgagggggtgg

SEQ ID NO: 4623 - DNA, 31 bp, Artificial Sequence
  Description of Artificial Sequence:  Enzymatic Nucleic Acid
cgcggcatggctagctacaacgacgcggggg

SEQ ID NO: 4624 - DNA, 31 bp, Artificial Sequence
  Description of Artificial Sequence:  Enzymatic Nucleic Acid
cgcgcggcggctagctacaacgaatcgcggg

SEQ ID NO: 4625 - DNA, 31 bp, Artificial Sequence
  Description of Artificial Sequence:  Enzymatic Nucleic Acid
gagcgcgcggctagctacaacgaggcatcgc

SEQ ID NO: 4626 - DNA, 31 bp, Artificial Sequence
  Description of Artificial Sequence:  Enzymatic Nucleic Acid
gggagcgcggctagctacaacgagcggcatc

SEQ ID NO: 4627 - DNA, 31 bp, Artificial Sequence
  Description of Artificial Sequence:  Enzymatic Nucleic Acid
cggggagcggctagctacaacgagcgcggca

SEQ ID NO: 4628 - DNA, 31 bp, Artificial Sequence
  Description of Artificial Sequence:  Enzymatic Nucleic Acid
tcggcagcggctagctacaacgaggggagcg

SEQ ID NO: 4629 - DNA, 31 bp, Artificial Sequence
  Description of Artificial Sequence:  Enzymatic Nucleic Acid
ggctcggcggctagctacaacgaagcgggga

SEQ ID NO: 4630 - DNA, 31 bp, Artificial Sequence
  Description of Artificial Sequence:  Enzymatic Nucleic Acid
cgcacggcggctagctacaacgatcggcagc

SEQ ID NO: 4631 - DNA, 31 bp, Artificial Sequence
  Description of Artificial Sequence:  Enzymatic Nucleic Acid
gagcgcacggctagctacaacgaggctcggc

SEQ ID NO: 4632 - DNA, 31 bp, Artificial Sequence
  Description of Artificial Sequence:  Enzymatic Nucleic Acid
gggagcgcggctagctacaacgaacggctcg

SEQ ID NO: 4633 - DNA, 31 bp, Artificial Sequence
  Description of Artificial Sequence:  Enzymatic Nucleic Acid
cagggagcggctagctacaacgagcacggct

SEQ ID NO: 4634 - DNA, 31 bp, Artificial Sequence
  Description of Artificial Sequence:  Enzymatic Nucleic Acid
tgcgcagcggctagctacaacgaagggagcg

SEQ ID NO: 4635 - DNA, 31 bp, Artificial Sequence
  Description of Artificial Sequence:  Enzymatic Nucleic Acid
ggctgcgcggctagctacaacgaagcaggga

SEQ ID NO: 4636 - DNA, 31 bp, Artificial Sequence
  Description of Artificial Sequence:  Enzymatic Nucleic Acid
gtggctgcggctagctacaacgagcagcagg

SEQ ID NO: 4637 - DNA, 31 bp, Artificial Sequence
  Description of Artificial Sequence:  Enzymatic Nucleic Acid
gtagtggcggctagctacaacgatgcgcagc

SEQ ID NO: 4638 - DNA, 31 bp, Artificial Sequence
  Description of Artificial Sequence:  Enzymatic Nucleic Acid
gcggtagtggctagctacaacgaggctgcgc

SEQ ID NO: 4639 - DNA, 31 bp, Artificial Sequence
  Description of Artificial Sequence:  Enzymatic Nucleic Acid
ctcgcggtggctagctacaacgaagtggctg

SEQ ID NO: 4640 - DNA, 31 bp, Artificial Sequence
  Description of Artificial Sequence:  Enzymatic Nucleic Acid
cacctcgcggctagctacaacgaggtagtgg

SEQ ID NO: 4641 - DNA, 31 bp, Artificial Sequence
  Description of Artificial Sequence:  Enzymatic Nucleic Acid
ggcagcacggctagctacaacgactcgcggt

SEQ ID NO: 4642 - DNA, 31 bp, Artificial Sequence
  Description of Artificial Sequence:  Enzymatic Nucleic Acid
gcggcagcggctagctacaacgaacctcgcg

SEQ ID NO: 4643 - DNA, 31 bp, Artificial Sequence
  Description of Artificial Sequence:  Enzymatic Nucleic Acid
ccagcggcggctagctacaacgaagcacctc

SEQ ID NO: 4644 - DNA, 31 bp, Artificial Sequence
  Description of Artificial Sequence:  Enzymatic Nucleic Acid
tggccagcggctagctacaacgaggcagcac

SEQ ID NO: 4645 - DNA, 31 bp, Artificial Sequence
  Description of Artificial Sequence:  Enzymatic Nucleic Acid
aacgtggcggctagctacaacgacagcggca

SEQ ID NO: 4646 - DNA, 31 bp, Artificial Sequence
  Description of Artificial Sequence:  Enzymatic Nucleic Acid
acgaacgtggctagctacaacgaggccagcg

SEQ ID NO: 4647 - DNA, 31 bp, Artificial Sequence
  Description of Artificial Sequence:  Enzymatic Nucleic Acid
gcacgaacggctagctacaacgagtggccag

SEQ ID NO: 4648 - DNA, 31 bp, Artificial Sequence
  Description of Artificial Sequence:  Enzymatic Nucleic Acid
cgccgcacggctagctacaacgagaacgtgg

SEQ ID NO: 4649 - DNA, 31 bp, Artificial Sequence
  Description of Artificial Sequence:  Enzymatic Nucleic Acid
ggcgccgcggctagctacaacgaacgaacgt

SEQ ID NO: 4650 - DNA, 31 bp, Artificial Sequence
  Description of Artificial Sequence:  Enzymatic Nucleic Acid
ccaggcgcggctagctacaacgacgcacgaa

SEQ ID NO: 4651 - DNA, 31 bp, Artificial Sequence
  Description of Artificial Sequence:  Enzymatic Nucleic Acid
ccccaggcggctagctacaacgagccgcacg

SEQ ID NO: 4652 - DNA, 31 bp, Artificial Sequence
  Description of Artificial Sequence:  Enzymatic Nucleic Acid
cctggggcggctagctacaacgacccaggcg

SEQ ID NO: 4653 - DNA, 31 bp, Artificial Sequence
  Description of Artificial Sequence:  Enzymatic Nucleic Acid
ccgccagcggctagctacaacgacctggggc

SEQ ID NO: 4654 - DNA, 31 bp, Artificial Sequence
  Description of Artificial Sequence:  Enzymatic Nucleic Acid
ccagccgcggctagctacaacgacagccctg

SEQ ID NO: 4655 - DNA, 31 bp, Artificial Sequence
  Description of Artificial Sequence:  Enzymatic Nucleic Acid
gcaccagcggctagctacaacgacgccagcc

SEQ ID NO: 4656 - DNA, 31 bp, Artificial Sequence
  Description of Artificial Sequence:  Enzymatic Nucleic Acid
cgctgcacggctagctacaacgacagccgcc

SEQ ID NO: 4657 - DNA, 31 bp, Artificial Sequence
  Description of Artificial Sequence:  Enzymatic Nucleic Acid
cgcgctgcggctagctacaacgaaccagccg

SEQ ID NO: 4658 - DNA, 31 bp, Artificial Sequence
  Description of Artificial Sequence:  Enzymatic Nucleic Acid
ccccgcgcggctagctacaacgatgcaccag

SEQ ID NO: 4659 - DNA, 31 bp, Artificial Sequence
  Description of Artificial Sequence:  Enzymatic Nucleic Acid
gtccccgcggctagctacaacgagctgcacc

SEQ ID NO: 4660 - DNA, 31 bp, Artificial Sequence
  Description of Artificial Sequence:  Enzymatic Nucleic Acid
cgccgggtggctagctacaacgaccccgcgc

SEQ ID NO: 4661 - DNA, 31 bp, Artificial Sequence
  Description of Artificial Sequence:  Enzymatic Nucleic Acid
aaagccgcggctagctacaacgacgggtccc

SEQ ID NO: 4662 - DNA, 31 bp, Artificial Sequence
  Description of Artificial Sequence:  Enzymatic Nucleic Acid
cggaaagcggctagctacaacgacgccgggt

SEQ ID NO: 4663 - DNA, 31 bp, Artificial Sequence
  Description of Artificial Sequence:  Enzymatic Nucleic Acid
cagcgcgcggctagctacaacgaggaaagcc

SEQ ID NO: 4664 - DNA, 31 bp, Artificial Sequence
  Description of Artificial Sequence:  Enzymatic Nucleic Acid
accagcgcggctagctacaacgagcggaaag

SEQ ID NO: 4665 - DNA, 31 bp, Artificial Sequence
  Description of Artificial Sequence:  Enzymatic Nucleic Acid
ccaccagcggctagctacaacgagcgcggaa

SEQ ID NO: 4666 - DNA, 31 bp, Artificial Sequence
  Description of Artificial Sequence:  Enzymatic Nucleic Acid
tgggccacggctagctacaacgacagcgcgc

SEQ ID NO: 4667 - DNA, 31 bp, Artificial Sequence
  Description of Artificial Sequence:  Enzymatic Nucleic Acid
cactgggcggctagctacaacgacaccagcg

SEQ ID NO: 4668 - DNA, 31 bp, Artificial Sequence
  Description of Artificial Sequence:  Enzymatic Nucleic Acid
ccaggcacggctagctacaacgatgggccac

SEQ ID NO: 4669 - DNA, 31 bp, Artificial Sequence
  Description of Artificial Sequence:  Enzymatic Nucleic Acid
caccaggcggctagctacaacgaactgggcc

SEQ ID NO: 4670 - DNA, 31 bp, Artificial Sequence
  Description of Artificial Sequence:  Enzymatic Nucleic Acid
acgcacacggctagctacaacgacaggcact

SEQ ID NO: 4671 - DNA, 31 bp, Artificial Sequence
  Description of Artificial Sequence:  Enzymatic Nucleic Acid
gcacgcacggctagctacaacgaaccaggca

SEQ ID NO: 4672 - DNA, 31 bp, Artificial Sequence
  Description of Artificial Sequence:  Enzymatic Nucleic Acid
gggcacgcggctagctacaacgaacaccagg

SEQ ID NO: 4673 - DNA, 31 bp, Artificial Sequence
  Description of Artificial Sequence:  Enzymatic Nucleic Acid
cagggcacggctagctacaacgagcacacca

SEQ ID NO: 4674 - DNA, 31 bp, Artificial Sequence
  Description of Artificial Sequence:  Enzymatic Nucleic Acid
cccagggcggctagctacaacgaacgcacac

SEQ ID NO: 4675 - DNA, 31 bp, Artificial Sequence
  Description of Artificial Sequence:  Enzymatic Nucleic Acid
ccgtgcgtggctagctacaacgacccagggc

SEQ ID NO: 4676 - DNA, 31 bp, Artificial Sequence
  Description of Artificial Sequence:  Enzymatic Nucleic Acid
ggccgtgcggctagctacaacgagtcccagg

SEQ ID NO: 4677 - DNA, 31 bp, Artificial Sequence
  Description of Artificial Sequence:  Enzymatic Nucleic Acid
gcggccgtggctagctacaacgagcgtccca

SEQ ID NO: 4678 - DNA, 31 bp, Artificial Sequence
  Description of Artificial Sequence:  Enzymatic Nucleic Acid
ggggcggcggctagctacaacgacgtgcgtc

SEQ ID NO: 4679 - DNA, 31 bp, Artificial Sequence
  Description of Artificial Sequence:  Enzymatic Nucleic Acid
cggggggcggctagctacaacgaggccgtgc

SEQ ID NO: 4680 - DNA, 31 bp, Artificial Sequence
  Description of Artificial Sequence:  Enzymatic Nucleic Acid
ggggcggcggctagctacaacgaggggggcg

SEQ ID NO: 4681 - DNA, 31 bp, Artificial Sequence
  Description of Artificial Sequence:  Enzymatic Nucleic Acid
gagggggcggctagctacaacgaggcggggg

SEQ ID NO: 4682 - DNA, 31 bp, Artificial Sequence
  Description of Artificial Sequence:  Enzymatic Nucleic Acid
cacctggcggctagctacaacgaggaaggag

SEQ ID NO: 4683 - DNA, 31 bp, Artificial Sequence
  Description of Artificial Sequence:  Enzymatic Nucleic Acid
caggacacggctagctacaacgactggcgga

SEQ ID NO: 4684 - DNA, 31 bp, Artificial Sequence
  Description of Artificial Sequence:  Enzymatic Nucleic Acid
ggcaggacggctagctacaacgaacctggcg

SEQ ID NO: 4685 - DNA, 31 bp, Artificial Sequence
  Description of Artificial Sequence:  Enzymatic Nucleic Acid
cttcaggcggctagctacaacgaaggacacc

SEQ ID NO: 4686 - DNA, 31 bp, Artificial Sequence
  Description of Artificial Sequence:  Enzymatic Nucleic Acid
ccaccagcggctagctacaacgatccttcag

SEQ ID NO: 4687 - DNA, 31 bp, Artificial Sequence
  Description of Artificial Sequence:  Enzymatic Nucleic Acid
cgggccacggctagctacaacgacagctcct

SEQ ID NO: 4688 - DNA, 31 bp, Artificial Sequence
  Description of Artificial Sequence:  Enzymatic Nucleic Acid
actcgggcggctagctacaacgacaccagct

SEQ ID NO: 4689 - DNA, 31 bp, Artificial Sequence
  Description of Artificial Sequence:  Enzymatic Nucleic Acid
tgcagcacggctagctacaacgatcgggcca

SEQ ID NO: 4690 - DNA, 31 bp, Artificial Sequence
  Description of Artificial Sequence:  Enzymatic Nucleic Acid
tctgcagcggctagctacaacgaactcgggc

SEQ ID NO: 4691 - DNA, 31 bp, Artificial Sequence
  Description of Artificial Sequence:  Enzymatic Nucleic Acid
gcctctgcggctagctacaacgaagcactcg

SEQ ID NO: 4692 - DNA, 31 bp, Artificial Sequence
  Description of Artificial Sequence:  Enzymatic Nucleic Acid
cgcacagcggctagctacaacgactctgcag

SEQ ID NO: 4693 - DNA, 31 bp, Artificial Sequence
  Description of Artificial Sequence:  Enzymatic Nucleic Acid
gctcgcacggctagctacaacgaagcctctg

SEQ ID NO: 4694 - DNA, 31 bp, Artificial Sequence
  Description of Artificial Sequence:  Enzymatic Nucleic Acid
gcgctcgcggctagctacaacgaacagcctc

SEQ ID NO: 4695 - DNA, 31 bp, Artificial Sequence
  Description of Artificial Sequence:  Enzymatic Nucleic Acid
cgccgcgcggctagctacaacgatcgcacag

SEQ ID NO: 4696 - DNA, 31 bp, Artificial Sequence
  Description of Artificial Sequence:  Enzymatic Nucleic Acid
cgcgccgcggctagctacaacgagctcgcac

SEQ ID NO: 4697 - DNA, 31 bp, Artificial Sequence
  Description of Artificial Sequence:  Enzymatic Nucleic Acid
cttcgcgcggctagctacaacgacgcgctcg

SEQ ID NO: 4698 - DNA, 31 bp, Artificial Sequence
  Description of Artificial Sequence:  Enzymatic Nucleic Acid
ttcttcgcggctagctacaacgagccgcgct

SEQ ID NO: 4699 - DNA, 31 bp, Artificial Sequence
  Description of Artificial Sequence:  Enzymatic Nucleic Acid
cagcacgtggctagctacaacgatcttcgcg

SEQ ID NO: 4700 - DNA, 31 bp, Artificial Sequence
  Description of Artificial Sequence:  Enzymatic Nucleic Acid
gccagcacggctagctacaacgagttcttcg

SEQ ID NO: 4701 - DNA, 31 bp, Artificial Sequence
  Description of Artificial Sequence:  Enzymatic Nucleic Acid
aggccagcggctagctacaacgaacgttctt

SEQ ID NO: 4702 - DNA, 31 bp, Artificial Sequence
  Description of Artificial Sequence:  Enzymatic Nucleic Acid
ccgaaggcggctagctacaacgacagcacgt

SEQ ID NO: 4703 - DNA, 31 bp, Artificial Sequence
  Description of Artificial Sequence:  Enzymatic Nucleic Acid
cgcgaagcggctagctacaacgacgaaggcc

SEQ ID NO: 4704 - DNA, 31 bp, Artificial Sequence
  Description of Artificial Sequence:  Enzymatic Nucleic Acid
agcagcgcggctagctacaacgagaagccga

SEQ ID NO: 4705 - DNA, 31 bp, Artificial Sequence
  Description of Artificial Sequence:  Enzymatic Nucleic Acid
ccagcagcggctagctacaacgagcgaagcc

SEQ ID NO: 4706 - DNA, 31 bp, Artificial Sequence
  Description of Artificial Sequence:  Enzymatic Nucleic Acid
cgtccagcggctagctacaacgaagcgcgaa

SEQ ID NO: 4707 - DNA, 31 bp, Artificial Sequence
  Description of Artificial Sequence:  Enzymatic Nucleic Acid
ggccccgtggctagctacaacgaccagcagc

SEQ ID NO: 4708 - DNA, 31 bp, Artificial Sequence
  Description of Artificial Sequence:  Enzymatic Nucleic Acid
ccgcgggcggctagctacaacgacccgtcca

SEQ ID NO: 4709 - DNA, 31 bp, Artificial Sequence
  Description of Artificial Sequence:  Enzymatic Nucleic Acid
gcccccgcggctagctacaacgagggccccg

SEQ ID NO: 4710 - DNA, 31 bp, Artificial Sequence
  Description of Artificial Sequence:  Enzymatic Nucleic Acid
gggggggcggctagctacaacgaccccgcgg

SEQ ID NO: 4711 - DNA, 31 bp, Artificial Sequence
  Description of Artificial Sequence:  Enzymatic Nucleic Acid
gtgaaggcggctagctacaacgactcggggg

SEQ ID NO: 4712 - DNA, 31 bp, Artificial Sequence
  Description of Artificial Sequence:  Enzymatic Nucleic Acid
ctggtggtggctagctacaacgagaaggcct

SEQ ID NO: 4713 - DNA, 31 bp, Artificial Sequence
  Description of Artificial Sequence:  Enzymatic Nucleic Acid
acgctggtggctagctacaacgaggtgaagg

SEQ ID NO: 4714 - DNA, 31 bp, Artificial Sequence
  Description of Artificial Sequence:  Enzymatic Nucleic Acid
gcgcacgcggctagctacaacgatggtggtg

SEQ ID NO: 4715 - DNA, 31 bp, Artificial Sequence
  Description of Artificial Sequence:  Enzymatic Nucleic Acid
ctgcgcacggctagctacaacgagctggtgg

SEQ ID NO: 4716 - DNA, 31 bp, Artificial Sequence
  Description of Artificial Sequence:  Enzymatic Nucleic Acid
agctgcgcggctagctacaacgaacgctggt

SEQ ID NO: 4717 - DNA, 31 bp, Artificial Sequence
  Description of Artificial Sequence:  Enzymatic Nucleic Acid
gtagctgcggctagctacaacgagcacgctg

SEQ ID NO: 4718 - DNA, 31 bp, Artificial Sequence
  Description of Artificial Sequence:  Enzymatic Nucleic Acid
caggtagcggctagctacaacgatgcgcacg

SEQ ID NO: 4719 - DNA, 31 bp, Artificial Sequence
  Description of Artificial Sequence:  Enzymatic Nucleic Acid
gggcaggtggctagctacaacgaagctgcgc

SEQ ID NO: 4720 - DNA, 31 bp, Artificial Sequence
  Description of Artificial Sequence:  Enzymatic Nucleic Acid
tgttgggcggctagctacaacgaaggtagct

SEQ ID NO: 4721 - DNA, 31 bp, Artificial Sequence
  Description of Artificial Sequence:  Enzymatic Nucleic Acid
caccgtgtggctagctacaacgatgggcagg

SEQ ID NO: 4722 - DNA, 31 bp, Artificial Sequence
  Description of Artificial Sequence:  Enzymatic Nucleic Acid
gtcaccgtggctagctacaacgagttgggca

SEQ ID NO: 4723 - DNA, 31 bp, Artificial Sequence
  Description of Artificial Sequence:  Enzymatic Nucleic Acid
tcggtcacggctagctacaacgacgtgttgg

SEQ ID NO: 4724 - DNA, 31 bp, Artificial Sequence
  Description of Artificial Sequence:  Enzymatic Nucleic Acid
gcgtcggtggctagctacaacgacaccgtgt

SEQ ID NO: 4725 - DNA, 31 bp, Artificial Sequence
  Description of Artificial Sequence:  Enzymatic Nucleic Acid
cagtgcgtggctagctacaacgacggtcacc

SEQ ID NO: 4726 - DNA, 31 bp, Artificial Sequence
  Description of Artificial Sequence:  Enzymatic Nucleic Acid
cgcagtgcggctagctacaacgagtcggtca

SEQ ID NO: 4727 - DNA, 31 bp, Artificial Sequence
  Description of Artificial Sequence:  Enzymatic Nucleic Acid
cccgcagtggctagctacaacgagcgtcggt

SEQ ID NO: 4728 - DNA, 31 bp, Artificial Sequence
  Description of Artificial Sequence:  Enzymatic Nucleic Acid
tcccccgcggctagctacaacgaagtgcgtc

SEQ ID NO: 4729 - DNA, 31 bp, Artificial Sequence
  Description of Artificial Sequence:  Enzymatic Nucleic Acid
cgccccgcggctagctacaacgatcccccgc

SEQ ID NO: 4730 - DNA, 31 bp, Artificial Sequence
  Description of Artificial Sequence:  Enzymatic Nucleic Acid
ccccacgcggctagctacaacgacccgctcc

SEQ ID NO: 4731 - DNA, 31 bp, Artificial Sequence
  Description of Artificial Sequence:  Enzymatic Nucleic Acid
gcccccacggctagctacaacgagccccgct

SEQ ID NO: 4732 - DNA, 31 bp, Artificial Sequence
  Description of Artificial Sequence:  Enzymatic Nucleic Acid
gcagcagcggctagctacaacgaccccacgc

SEQ ID NO: 4733 - DNA, 31 bp, Artificial Sequence
  Description of Artificial Sequence:  Enzymatic Nucleic Acid
gcagcagcggctagctacaacgaagccccca

SEQ ID NO: 4734 - DNA, 31 bp, Artificial Sequence
  Description of Artificial Sequence:  Enzymatic Nucleic Acid
ggcgcagcggctagctacaacgaagcagccc

SEQ ID NO: 4735 - DNA, 31 bp, Artificial Sequence
  Description of Artificial Sequence:  Enzymatic Nucleic Acid
cgcggcgcggctagctacaacgaagcagcag

SEQ ID NO: 4736 - DNA, 31 bp, Artificial Sequence
  Description of Artificial Sequence:  Enzymatic Nucleic Acid
cacgcggcggctagctacaacgagcagcagc

SEQ ID NO: 4737 - DNA, 31 bp, Artificial Sequence
  Description of Artificial Sequence:  Enzymatic Nucleic Acid
gcccacgcggctagctacaacgaggcgcagc

SEQ ID NO: 4738 - DNA, 31 bp, Artificial Sequence
  Description of Artificial Sequence:  Enzymatic Nucleic Acid
tcgcccacggctagctacaacgagcggcgca

SEQ ID NO: 4739 - DNA, 31 bp, Artificial Sequence
  Description of Artificial Sequence:  Enzymatic Nucleic Acid
gtcgtcgcggctagctacaacgaccacgcgg

SEQ ID NO: 4740 - DNA, 31 bp, Artificial Sequence
  Description of Artificial Sequence:  Enzymatic Nucleic Acid
cacgtcgtggctagctacaacgacgcccacg

SEQ ID NO: 4741 - DNA, 31 bp, Artificial Sequence
  Description of Artificial Sequence:  Enzymatic Nucleic Acid
cagcacgtggctagctacaacgacgtcgccc

SEQ ID NO: 4742 - DNA, 31 bp, Artificial Sequence
  Description of Artificial Sequence:  Enzymatic Nucleic Acid
accagcacggctagctacaacgagtcgtcgc

SEQ ID NO: 4743 - DNA, 31 bp, Artificial Sequence
  Description of Artificial Sequence:  Enzymatic Nucleic Acid
gaaccagcggctagctacaacgaacgtcgtc

SEQ ID NO: 4744 - DNA, 31 bp, Artificial Sequence
  Description of Artificial Sequence:  Enzymatic Nucleic Acid
aggtgaacggctagctacaacgacagcacgt

SEQ ID NO: 4745 - DNA, 31 bp, Artificial Sequence
  Description of Artificial Sequence:  Enzymatic Nucleic Acid
cagcaggtggctagctacaacgagaaccagc

SEQ ID NO: 4746 - DNA, 31 bp, Artificial Sequence
  Description of Artificial Sequence:  Enzymatic Nucleic Acid
gtgccagcggctagctacaacgaaggtgaac

SEQ ID NO: 4747 - DNA, 31 bp, Artificial Sequence
  Description of Artificial Sequence:  Enzymatic Nucleic Acid
cagcgtgcggctagctacaacgacagcaggt

SEQ ID NO: 4748 - DNA, 31 bp, Artificial Sequence
  Description of Artificial Sequence:  Enzymatic Nucleic Acid
cgcagcgtggctagctacaacgagccagcag

SEQ ID NO: 4749 - DNA, 31 bp, Artificial Sequence
  Description of Artificial Sequence:  Enzymatic Nucleic Acid
cgcgcagcggctagctacaacgagtgccagc

SEQ ID NO: 4750 - DNA, 31 bp, Artificial Sequence
  Description of Artificial Sequence:  Enzymatic Nucleic Acid
gagcgcgcggctagctacaacgaagcgtgcc

SEQ ID NO: 4751 - DNA, 31 bp, Artificial Sequence
  Description of Artificial Sequence:  Enzymatic Nucleic Acid
aagagcgcggctagctacaacgagcagcgtg

SEQ ID NO: 4752 - DNA, 31 bp, Artificial Sequence
  Description of Artificial Sequence:  Enzymatic Nucleic Acid
caaagagcggctagctacaacgagcgcagcg

SEQ ID NO: 4753 - DNA, 31 bp, Artificial Sequence
  Description of Artificial Sequence:  Enzymatic Nucleic Acid
accagcacggctagctacaacgaaaagagcg

SEQ ID NO: 4754 - DNA, 31 bp, Artificial Sequence
  Description of Artificial Sequence:  Enzymatic Nucleic Acid
ccaccagcggctagctacaacgaacaaagag

SEQ ID NO: 4755 - DNA, 31 bp, Artificial Sequence
  Description of Artificial Sequence:  Enzymatic Nucleic Acid
ggagccacggctagctacaacgacagcacaa

SEQ ID NO: 4756 - DNA, 31 bp, Artificial Sequence
  Description of Artificial Sequence:  Enzymatic Nucleic Acid
ctgggagcggctagctacaacgacaccagca

SEQ ID NO: 4757 - DNA, 31 bp, Artificial Sequence
  Description of Artificial Sequence:  Enzymatic Nucleic Acid
ggcgcagcggctagctacaacgatgggagcc

SEQ ID NO: 4758 - DNA, 31 bp, Artificial Sequence
  Description of Artificial Sequence:  Enzymatic Nucleic Acid
gtaggcgcggctagctacaacgaagctggga

SEQ ID NO: 4759 - DNA, 31 bp, Artificial Sequence
  Description of Artificial Sequence:  Enzymatic Nucleic Acid
tggtaggcggctagctacaacgagcagctgg

SEQ ID NO: 4760 - DNA, 31 bp, Artificial Sequence
  Description of Artificial Sequence:  Enzymatic Nucleic Acid
cacctggtggctagctacaacgaaggcgcag

SEQ ID NO: 4761 - DNA, 31 bp, Artificial Sequence
  Description of Artificial Sequence:  Enzymatic Nucleic Acid
ccgcacacggctagctacaacgactggtagg

SEQ ID NO: 4762 - DNA, 31 bp, Artificial Sequence
  Description of Artificial Sequence:  Enzymatic Nucleic Acid
gcccgcacggctagctacaacgaacctggta

SEQ ID NO: 4763 - DNA, 31 bp, Artificial Sequence
  Description of Artificial Sequence:  Enzymatic Nucleic Acid
cggcccgcggctagctacaacgaacacctgg

SEQ ID NO: 4764 - DNA, 31 bp, Artificial Sequence
  Description of Artificial Sequence:  Enzymatic Nucleic Acid
gcggcggcggctagctacaacgaccgcacac

SEQ ID NO: 4765 - DNA, 31 bp, Artificial Sequence
  Description of Artificial Sequence:  Enzymatic Nucleic Acid
acagcggcggctagctacaacgaggcccgca

SEQ ID NO: 4766 - DNA, 31 bp, Artificial Sequence
  Description of Artificial Sequence:  Enzymatic Nucleic Acid
ggtacagcggctagctacaacgaggcggccc

SEQ ID NO: 4767 - DNA, 31 bp, Artificial Sequence
  Description of Artificial Sequence:  Enzymatic Nucleic Acid
gctggtacggctagctacaacgaagcggcgg

SEQ ID NO: 4768 - DNA, 31 bp, Artificial Sequence
  Description of Artificial Sequence:  Enzymatic Nucleic Acid
gagctggtggctagctacaacgaacagcggc

SEQ ID NO: 4769 - DNA, 31 bp, Artificial Sequence
  Description of Artificial Sequence:  Enzymatic Nucleic Acid
cgccgagcggctagctacaacgatggtacag

SEQ ID NO: 4770 - DNA, 31 bp, Artificial Sequence
  Description of Artificial Sequence:  Enzymatic Nucleic Acid
ggcagcgcggctagctacaacgacgagctgg

SEQ ID NO: 4771 - DNA, 31 bp, Artificial Sequence
  Description of Artificial Sequence:  Enzymatic Nucleic Acid
gtggcagcggctagctacaacgagccgagct

SEQ ID NO: 4772 - DNA, 31 bp, Artificial Sequence
  Description of Artificial Sequence:  Enzymatic Nucleic Acid
tgagtggcggctagctacaacgaagcgccga

SEQ ID NO: 4773 - DNA, 31 bp, Artificial Sequence
  Description of Artificial Sequence:  Enzymatic Nucleic Acid
gcctgagtggctagctacaacgaggcagcgc

SEQ ID NO: 4774 - DNA, 31 bp, Artificial Sequence
  Description of Artificial Sequence:  Enzymatic Nucleic Acid
ggccgggcggctagctacaacgactgagtgg

SEQ ID NO: 4775 - DNA, 31 bp, Artificial Sequence
  Description of Artificial Sequence:  Enzymatic Nucleic Acid
gcgggggcggctagctacaacgacgggcctg

SEQ ID NO: 4776 - DNA, 31 bp, Artificial Sequence
  Description of Artificial Sequence:  Enzymatic Nucleic Acid
cgtgtggcggctagctacaacgagggggccg

SEQ ID NO: 4777 - DNA, 31 bp, Artificial Sequence
  Description of Artificial Sequence:  Enzymatic Nucleic Acid
tagcgtgtggctagctacaacgaggcggggg

SEQ ID NO: 4778 - DNA, 31 bp, Artificial Sequence
  Description of Artificial Sequence:  Enzymatic Nucleic Acid
actagcgtggctagctacaacgagtggcggg

SEQ ID NO: 4779 - DNA, 31 bp, Artificial Sequence
  Description of Artificial Sequence:  Enzymatic Nucleic Acid
ccactagcggctagctacaacgagtgtggcg

SEQ ID NO: 4780 - DNA, 31 bp, Artificial Sequence
  Description of Artificial Sequence:  Enzymatic Nucleic Acid
gggtccacggctagctacaacgatagcgtgt

SEQ ID NO: 4781 - DNA, 31 bp, Artificial Sequence
  Description of Artificial Sequence:  Enzymatic Nucleic Acid
ttcggggtggctagctacaacgaccactagc

SEQ ID NO: 4782 - DNA, 31 bp, Artificial Sequence
  Description of Artificial Sequence:  Enzymatic Nucleic Acid
ccagacgcggctagctacaacgacttcgggg

SEQ ID NO: 4783 - DNA, 31 bp, Artificial Sequence
  Description of Artificial Sequence:  Enzymatic Nucleic Acid
tcccagacggctagctacaacgagccttcgg

SEQ ID NO: 4784 - DNA, 31 bp, Artificial Sequence
  Description of Artificial Sequence:  Enzymatic Nucleic Acid
gttcgcatggctagctacaacgacccagacg

SEQ ID NO: 4785 - DNA, 31 bp, Artificial Sequence
  Description of Artificial Sequence:  Enzymatic Nucleic Acid
ccgttcgcggctagctacaacgaatcccaga

SEQ ID NO: 4786 - DNA, 31 bp, Artificial Sequence
  Description of Artificial Sequence:  Enzymatic Nucleic Acid
aggcccgtggctagctacaacgatcgcatcc

SEQ ID NO: 4787 - DNA, 31 bp, Artificial Sequence
  Description of Artificial Sequence:  Enzymatic Nucleic Acid
ttccaggcggctagctacaacgaccgttcgc

SEQ ID NO: 4788 - DNA, 31 bp, Artificial Sequence
  Description of Artificial Sequence:  Enzymatic Nucleic Acid
gctatggtggctagctacaacgatccaggcc

SEQ ID NO: 4789 - DNA, 31 bp, Artificial Sequence
  Description of Artificial Sequence:  Enzymatic Nucleic Acid
gacgctatggctagctacaacgaggttccag

SEQ ID NO: 4790 - DNA, 31 bp, Artificial Sequence
  Description of Artificial Sequence:  Enzymatic Nucleic Acid
cctgacgcggctagctacaacgatatggttc

SEQ ID NO: 4791 - DNA, 31 bp, Artificial Sequence
  Description of Artificial Sequence:  Enzymatic Nucleic Acid
tccctgacggctagctacaacgagctatggt

SEQ ID NO: 4792 - DNA, 31 bp, Artificial Sequence
  Description of Artificial Sequence:  Enzymatic Nucleic Acid
accccggcggctagctacaacgactccctga

SEQ ID NO: 4793 - DNA, 31 bp, Artificial Sequence
  Description of Artificial Sequence:  Enzymatic Nucleic Acid
agggggacggctagctacaacgacccggcct

SEQ ID NO: 4794 - DNA, 31 bp, Artificial Sequence
  Description of Artificial Sequence:  Enzymatic Nucleic Acid
tggcaggcggctagctacaacgaccaggggg

SEQ ID NO: 4795 - DNA, 31 bp, Artificial Sequence
  Description of Artificial Sequence:  Enzymatic Nucleic Acid
gggctggcggctagctacaacgaaggcccag

SEQ ID NO: 4796 - DNA, 31 bp, Artificial Sequence
  Description of Artificial Sequence:  Enzymatic Nucleic Acid
cccggggcggctagctacaacgatggcaggc

SEQ ID NO: 4797 - DNA, 31 bp, Artificial Sequence
  Description of Artificial Sequence:  Enzymatic Nucleic Acid
cctcgcacggctagctacaacgaccggggct

SEQ ID NO: 4798 - DNA, 31 bp, Artificial Sequence
  Description of Artificial Sequence:  Enzymatic Nucleic Acid
ctcctcgcggctagctacaacgaacccgggg

SEQ ID NO: 4799 - DNA, 31 bp, Artificial Sequence
  Description of Artificial Sequence:  Enzymatic Nucleic Acid
ccccgcgcggctagctacaacgactcctcgc

SEQ ID NO: 4800 - DNA, 31 bp, Artificial Sequence
  Description of Artificial Sequence:  Enzymatic Nucleic Acid
gcccccgcggctagctacaacgagcctcctc

SEQ ID NO: 4801 - DNA, 31 bp, Artificial Sequence
  Description of Artificial Sequence:  Enzymatic Nucleic Acid
ggcactgcggctagctacaacgaccccgcgc

SEQ ID NO: 4802 - DNA, 31 bp, Artificial Sequence
  Description of Artificial Sequence:  Enzymatic Nucleic Acid
gctggcacggctagctacaacgatgcccccg

SEQ ID NO: 4803 - DNA, 31 bp, Artificial Sequence
  Description of Artificial Sequence:  Enzymatic Nucleic Acid
cggctggcggctagctacaacgaactgcccc

SEQ ID NO: 4804 - DNA, 31 bp, Artificial Sequence
  Description of Artificial Sequence:  Enzymatic Nucleic Acid
acttcggcggctagctacaacgatggcactg

SEQ ID NO: 4805 - DNA, 31 bp, Artificial Sequence
  Description of Artificial Sequence:  Enzymatic Nucleic Acid
cggcagacggctagctacaacgattcggctg

SEQ ID NO: 4806 - DNA, 31 bp, Artificial Sequence
  Description of Artificial Sequence:  Enzymatic Nucleic Acid
gcaacggcggctagctacaacgaagacttcg

SEQ ID NO: 4807 - DNA, 31 bp, Artificial Sequence
  Description of Artificial Sequence:  Enzymatic Nucleic Acid
tgggcaacggctagctacaacgaggcagact

SEQ ID NO: 4808 - DNA, 31 bp, Artificial Sequence
  Description of Artificial Sequence:  Enzymatic Nucleic Acid
tcttgggcggctagctacaacgaaacggcag

SEQ ID NO: 4809 - DNA, 31 bp, Artificial Sequence
  Description of Artificial Sequence:  Enzymatic Nucleic Acid
gcctgggcggctagctacaacgactcttggg

SEQ ID NO: 4810 - DNA, 31 bp, Artificial Sequence
  Description of Artificial Sequence:  Enzymatic Nucleic Acid
cgccacgcggctagctacaacgactgggcct

SEQ ID NO: 4811 - DNA, 31 bp, Artificial Sequence
  Description of Artificial Sequence:  Enzymatic Nucleic Acid
agcgccacggctagctacaacgagcctgggc

SEQ ID NO: 4812 - DNA, 31 bp, Artificial Sequence
  Description of Artificial Sequence:  Enzymatic Nucleic Acid
ggcagcgcggctagctacaacgacacgcctg

SEQ ID NO: 4813 - DNA, 31 bp, Artificial Sequence
  Description of Artificial Sequence:  Enzymatic Nucleic Acid
ggggcagcggctagctacaacgagccacgcc

SEQ ID NO: 4814 - DNA, 31 bp, Artificial Sequence
  Description of Artificial Sequence:  Enzymatic Nucleic Acid
tcaggggcggctagctacaacgaagcgccac

SEQ ID NO: 4815 - DNA, 31 bp, Artificial Sequence
  Description of Artificial Sequence:  Enzymatic Nucleic Acid
gctccggcggctagctacaacgatcaggggc

SEQ ID NO: 4816 - DNA, 31 bp, Artificial Sequence
  Description of Artificial Sequence:  Enzymatic Nucleic Acid
gcgtccgcggctagctacaacgatccggctc

SEQ ID NO: 4817 - DNA, 31 bp, Artificial Sequence
  Description of Artificial Sequence:  Enzymatic Nucleic Acid
acgggcgtggctagctacaacgaccgctccg

SEQ ID NO: 4818 - DNA, 31 bp, Artificial Sequence
  Description of Artificial Sequence:  Enzymatic Nucleic Acid
caacgggcggctagctacaacgagtccgctc

SEQ ID NO: 4819 - DNA, 31 bp, Artificial Sequence
  Description of Artificial Sequence:  Enzymatic Nucleic Acid
tgcccaacggctagctacaacgagggcgtcc

SEQ ID NO: 4820 - DNA, 31 bp, Artificial Sequence
  Description of Artificial Sequence:  Enzymatic Nucleic Acid
acccctgcggctagctacaacgaccaacggg

SEQ ID NO: 4821 - DNA, 31 bp, Artificial Sequence
  Description of Artificial Sequence:  Enzymatic Nucleic Acid
cccaggacggctagctacaacgaccctgccc

SEQ ID NO: 4822 - DNA, 31 bp, Artificial Sequence
  Description of Artificial Sequence:  Enzymatic Nucleic Acid
gggtgggcggctagctacaacgaccaggacc

SEQ ID NO: 4823 - DNA, 31 bp, Artificial Sequence
  Description of Artificial Sequence:  Enzymatic Nucleic Acid
gcccgggtggctagctacaacgagggcccag

SEQ ID NO: 4824 - DNA, 31 bp, Artificial Sequence
  Description of Artificial Sequence:  Enzymatic Nucleic Acid
cgtcctgcggctagctacaacgaccgggtgg

SEQ ID NO: 4825 - DNA, 31 bp, Artificial Sequence
  Description of Artificial Sequence:  Enzymatic Nucleic Acid
ccacgcgtggctagctacaacgacctgcccg

SEQ ID NO: 4826 - DNA, 31 bp, Artificial Sequence
  Description of Artificial Sequence:  Enzymatic Nucleic Acid
gtccacgcggctagctacaacgagtcctgcc

SEQ ID NO: 4827 - DNA, 31 bp, Artificial Sequence
  Description of Artificial Sequence:  Enzymatic Nucleic Acid
cggtccacggctagctacaacgagcgtcctg

SEQ ID NO: 4828 - DNA, 31 bp, Artificial Sequence
  Description of Artificial Sequence:  Enzymatic Nucleic Acid
cactcggtggctagctacaacgaccacgcgt

SEQ ID NO: 4829 - DNA, 31 bp, Artificial Sequence
  Description of Artificial Sequence:  Enzymatic Nucleic Acid
acggtcacggctagctacaacgatcggtcca

SEQ ID NO: 4830 - DNA, 31 bp, Artificial Sequence
  Description of Artificial Sequence:  Enzymatic Nucleic Acid
accacggtggctagctacaacgacactcggt

SEQ ID NO: 4831 - DNA, 31 bp, Artificial Sequence
  Description of Artificial Sequence:  Enzymatic Nucleic Acid
gaaaccacggctagctacaacgaggtcactc

SEQ ID NO: 4832 - DNA, 31 bp, Artificial Sequence
  Description of Artificial Sequence:  Enzymatic Nucleic Acid
acagaaacggctagctacaacgacacggtca

SEQ ID NO: 4833 - DNA, 31 bp, Artificial Sequence
  Description of Artificial Sequence:  Enzymatic Nucleic Acid
caccacacggctagctacaacgaagaaacca

SEQ ID NO: 4834 - DNA, 31 bp, Artificial Sequence
  Description of Artificial Sequence:  Enzymatic Nucleic Acid
gacaccacggctagctacaacgaacagaaac

SEQ ID NO: 4835 - DNA, 31 bp, Artificial Sequence
  Description of Artificial Sequence:  Enzymatic Nucleic Acid
ggtgacacggctagctacaacgacacacaga

SEQ ID NO: 4836 - DNA, 31 bp, Artificial Sequence
  Description of Artificial Sequence:  Enzymatic Nucleic Acid
caggtgacggctagctacaacgaaccacaca

SEQ ID NO: 4837 - DNA, 31 bp, Artificial Sequence
  Description of Artificial Sequence:  Enzymatic Nucleic Acid
tggcaggtggctagctacaacgagacaccac

SEQ ID NO: 4838 - DNA, 31 bp, Artificial Sequence
  Description of Artificial Sequence:  Enzymatic Nucleic Acid
ggtctggcggctagctacaacgaaggtgaca

SEQ ID NO: 4839 - DNA, 31 bp, Artificial Sequence
  Description of Artificial Sequence:  Enzymatic Nucleic Acid
cggcgggtggctagctacaacgactggcagg

SEQ ID NO: 4840 - DNA, 31 bp, Artificial Sequence
  Description of Artificial Sequence:  Enzymatic Nucleic Acid
tcttcggcggctagctacaacgagggtctgg

SEQ ID NO: 4841 - DNA, 31 bp, Artificial Sequence
  Description of Artificial Sequence:  Enzymatic Nucleic Acid
gaggtggcggctagctacaacgattcttcgg

SEQ ID NO: 4842 - DNA, 31 bp, Artificial Sequence
  Description of Artificial Sequence:  Enzymatic Nucleic Acid
aaagaggtggctagctacaacgaggcttctt

SEQ ID NO: 4843 - DNA, 31 bp, Artificial Sequence
  Description of Artificial Sequence:  Enzymatic Nucleic Acid
gagcgcacggctagctacaacgacctccaaa

SEQ ID NO: 4844 - DNA, 31 bp, Artificial Sequence
  Description of Artificial Sequence:  Enzymatic Nucleic Acid
gagagcgcggctagctacaacgaaccctcca

SEQ ID NO: 4845 - DNA, 31 bp, Artificial Sequence
  Description of Artificial Sequence:  Enzymatic Nucleic Acid
cagagagcggctagctacaacgagcaccctc

SEQ ID NO: 4846 - DNA, 31 bp, Artificial Sequence
  Description of Artificial Sequence:  Enzymatic Nucleic Acid
gcgcgtgcggctagctacaacgacagagagc

SEQ ID NO: 4847 - DNA, 31 bp, Artificial Sequence
  Description of Artificial Sequence:  Enzymatic Nucleic Acid
tggcgcgtggctagctacaacgagccagaga

SEQ ID NO: 4848 - DNA, 31 bp, Artificial Sequence
  Description of Artificial Sequence:  Enzymatic Nucleic Acid
agtggcgcggctagctacaacgagtgccaga

SEQ ID NO: 4849 - DNA, 31 bp, Artificial Sequence
  Description of Artificial Sequence:  Enzymatic Nucleic Acid
ggagtggcggctagctacaacgagcgtgcca

SEQ ID NO: 4850 - DNA, 31 bp, Artificial Sequence
  Description of Artificial Sequence:  Enzymatic Nucleic Acid
gtgggagtggctagctacaacgaggcgcgtg

SEQ ID NO: 4851 - DNA, 31 bp, Artificial Sequence
  Description of Artificial Sequence:  Enzymatic Nucleic Acid
ggatgggtggctagctacaacgagggagtgg

SEQ ID NO: 4852 - DNA, 31 bp, Artificial Sequence
  Description of Artificial Sequence:  Enzymatic Nucleic Acid
ccacggatggctagctacaacgagggtggga

SEQ ID NO: 4853 - DNA, 31 bp, Artificial Sequence
  Description of Artificial Sequence:  Enzymatic Nucleic Acid
cggcccacggctagctacaacgaggatgggt

SEQ ID NO: 4854 - DNA, 31 bp, Artificial Sequence
  Description of Artificial Sequence:  Enzymatic Nucleic Acid
ctggcggcggctagctacaacgaccacggat

SEQ ID NO: 4855 - DNA, 31 bp, Artificial Sequence
  Description of Artificial Sequence:  Enzymatic Nucleic Acid
gtgctggcggctagctacaacgaggcccacg

SEQ ID NO: 4856 - DNA, 31 bp, Artificial Sequence
  Description of Artificial Sequence:  Enzymatic Nucleic Acid
cgtggtgcggctagctacaacgatggcggcc

SEQ ID NO: 4857 - DNA, 31 bp, Artificial Sequence
  Description of Artificial Sequence:  Enzymatic Nucleic Acid
cgcgtggtggctagctacaacgagctggcgg

SEQ ID NO: 4858 - DNA, 31 bp, Artificial Sequence
  Description of Artificial Sequence:  Enzymatic Nucleic Acid
gcccgcgtggctagctacaacgaggtgctgg

SEQ ID NO: 4859 - DNA, 31 bp, Artificial Sequence
  Description of Artificial Sequence:  Enzymatic Nucleic Acid
gggcccgcggctagctacaacgagtggtgct

SEQ ID NO: 4860 - DNA, 31 bp, Artificial Sequence
  Description of Artificial Sequence:  Enzymatic Nucleic Acid
tggggggcggctagctacaacgaccgcgtgg

SEQ ID NO: 4861 - DNA, 31 bp, Artificial Sequence
  Description of Artificial Sequence:  Enzymatic Nucleic Acid
atgtggatggctagctacaacgaggggggcc

SEQ ID NO: 4862 - DNA, 31 bp, Artificial Sequence
  Description of Artificial Sequence:  Enzymatic Nucleic Acid
cgcgatgtggctagctacaacgaggatgggg

SEQ ID NO: 4863 - DNA, 31 bp, Artificial Sequence
  Description of Artificial Sequence:  Enzymatic Nucleic Acid
gccgcgatggctagctacaacgagtggatgg

SEQ ID NO: 4864 - DNA, 31 bp, Artificial Sequence
  Description of Artificial Sequence:  Enzymatic Nucleic Acid
gtggccgcggctagctacaacgagatgtgga

SEQ ID NO: 4865 - DNA, 31 bp, Artificial Sequence
  Description of Artificial Sequence:  Enzymatic Nucleic Acid
gtggtggcggctagctacaacgacgcgatgt

SEQ ID NO: 4866 - DNA, 31 bp, Artificial Sequence
  Description of Artificial Sequence:  Enzymatic Nucleic Acid
gacgtggtggctagctacaacgaggccgcga

SEQ ID NO: 4867 - DNA, 31 bp, Artificial Sequence
  Description of Artificial Sequence:  Enzymatic Nucleic Acid
agggacgtggctagctacaacgaggtggccg

SEQ ID NO: 4868 - DNA, 31 bp, Artificial Sequence
  Description of Artificial Sequence:  Enzymatic Nucleic Acid
ccagggacggctagctacaacgagtggtggc

SEQ ID NO: 4869 - DNA, 31 bp, Artificial Sequence
  Description of Artificial Sequence:  Enzymatic Nucleic Acid
aggcgtgtggctagctacaacgacccaggga

SEQ ID NO: 4870 - DNA, 31 bp, Artificial Sequence
  Description of Artificial Sequence:  Enzymatic Nucleic Acid
caaggcgtggctagctacaacgagtcccagg

SEQ ID NO: 4871 - DNA, 31 bp, Artificial Sequence
  Description of Artificial Sequence:  Enzymatic Nucleic Acid
gacaaggcggctagctacaacgagtgtccca

SEQ ID NO: 4872 - DNA, 31 bp, Artificial Sequence
  Description of Artificial Sequence:  Enzymatic Nucleic Acid
cgggggacggctagctacaacgaaaggcgtg

SEQ ID NO: 4873 - DNA, 31 bp, Artificial Sequence
  Description of Artificial Sequence:  Enzymatic Nucleic Acid
gcgtacacggctagctacaacgacgggggac

SEQ ID NO: 4874 - DNA, 31 bp, Artificial Sequence
  Description of Artificial Sequence:  Enzymatic Nucleic Acid
cggcgtacggctagctacaacgaaccggggg

SEQ ID NO: 4875 - DNA, 31 bp, Artificial Sequence
  Description of Artificial Sequence:  Enzymatic Nucleic Acid
ctcggcgtggctagctacaacgaacaccggg

SEQ ID NO: 4876 - DNA, 31 bp, Artificial Sequence
  Description of Artificial Sequence:  Enzymatic Nucleic Acid
gtctcggcggctagctacaacgagtacaccg

SEQ ID NO: 4877 - DNA, 31 bp, Artificial Sequence
  Description of Artificial Sequence:  Enzymatic Nucleic Acid
tgcttggtggctagctacaacgactcggcgt

SEQ ID NO: 4878 - DNA, 31 bp, Artificial Sequence
  Description of Artificial Sequence:  Enzymatic Nucleic Acid
ggaagtgcggctagctacaacgattggtctc

SEQ ID NO: 4879 - DNA, 31 bp, Artificial Sequence
  Description of Artificial Sequence:  Enzymatic Nucleic Acid
gaggaagtggctagctacaacgagcttggtc

SEQ ID NO: 4880 - DNA, 31 bp, Artificial Sequence
  Description of Artificial Sequence:  Enzymatic Nucleic Acid
tgaggagtggctagctacaacgaagaggaag

SEQ ID NO: 4881 - DNA, 31 bp, Artificial Sequence
  Description of Artificial Sequence:  Enzymatic Nucleic Acid
cttgtcgcggctagctacaacgactgaggag

SEQ ID NO: 4882 - DNA, 31 bp, Artificial Sequence
  Description of Artificial Sequence:  Enzymatic Nucleic Acid
ctccttgtggctagctacaacgacgcctgag

SEQ ID NO: 4883 - DNA, 31 bp, Artificial Sequence
  Description of Artificial Sequence:  Enzymatic Nucleic Acid
gcagctgcggctagctacaacgatccttgtc

SEQ ID NO: 4884 - DNA, 31 bp, Artificial Sequence
  Description of Artificial Sequence:  Enzymatic Nucleic Acid
gccgcagcggctagctacaacgatgctcctt

SEQ ID NO: 4885 - DNA, 31 bp, Artificial Sequence
  Description of Artificial Sequence:  Enzymatic Nucleic Acid
agggccgcggctagctacaacgaagctgctc

SEQ ID NO: 4886 - DNA, 31 bp, Artificial Sequence
  Description of Artificial Sequence:  Enzymatic Nucleic Acid
aggagggcggctagctacaacgacgcagctg

SEQ ID NO: 4887 - DNA, 31 bp, Artificial Sequence
  Description of Artificial Sequence:  Enzymatic Nucleic Acid
agctgagtggctagctacaacgaaggaagga

SEQ ID NO: 4888 - DNA, 31 bp, Artificial Sequence
  Description of Artificial Sequence:  Enzymatic Nucleic Acid
cagagagcggctagctacaacgatgagtagg

SEQ ID NO: 4889 - DNA, 31 bp, Artificial Sequence
  Description of Artificial Sequence:  Enzymatic Nucleic Acid
ggctgggcggctagctacaacgactcagaga

SEQ ID NO: 4890 - DNA, 31 bp, Artificial Sequence
  Description of Artificial Sequence:  Enzymatic Nucleic Acid
agtcaggcggctagctacaacgatgggcctc

SEQ ID NO: 4891 - DNA, 31 bp, Artificial Sequence
  Description of Artificial Sequence:  Enzymatic Nucleic Acid
gcgccagtggctagctacaacgacaggctgg

SEQ ID NO: 4892 - DNA, 31 bp, Artificial Sequence
  Description of Artificial Sequence:  Enzymatic Nucleic Acid
ccgagcgcggctagctacaacgacagtcagg

SEQ ID NO: 4893 - DNA, 31 bp, Artificial Sequence
  Description of Artificial Sequence:  Enzymatic Nucleic Acid
ctccgagcggctagctacaacgagccagtca

SEQ ID NO: 4894 - DNA, 31 bp, Artificial Sequence
  Description of Artificial Sequence:  Enzymatic Nucleic Acid
ccacgagcggctagctacaacgactccgagc

SEQ ID NO: 4895 - DNA, 31 bp, Artificial Sequence
  Description of Artificial Sequence:  Enzymatic Nucleic Acid
gtctccacggctagctacaacgagagcctcc

SEQ ID NO: 4896 - DNA, 31 bp, Artificial Sequence
  Description of Artificial Sequence:  Enzymatic Nucleic Acid
aagatggtggctagctacaacgactccacga

SEQ ID NO: 4897 - DNA, 31 bp, Artificial Sequence
  Description of Artificial Sequence:  Enzymatic Nucleic Acid
agaaagatggctagctacaacgaggtctcca

SEQ ID NO: 4898 - DNA, 31 bp, Artificial Sequence
  Description of Artificial Sequence:  Enzymatic Nucleic Acid
cctggaacggctagctacaacgaccagaaag

SEQ ID NO: 4899 - DNA, 31 bp, Artificial Sequence
  Description of Artificial Sequence:  Enzymatic Nucleic Acid
tccagggcggctagctacaacgactggaacc

SEQ ID NO: 4900 - DNA, 31 bp, Artificial Sequence
  Description of Artificial Sequence:  Enzymatic Nucleic Acid
cctggcatggctagctacaacgaccagggcc

SEQ ID NO: 4901 - DNA, 31 bp, Artificial Sequence
  Description of Artificial Sequence:  Enzymatic Nucleic Acid
tccctggcggctagctacaacgaatccaggg

SEQ ID NO: 4902 - DNA, 31 bp, Artificial Sequence
  Description of Artificial Sequence:  Enzymatic Nucleic Acid
cggggagtggctagctacaacgaccctggca

SEQ ID NO: 4903 - DNA, 31 bp, Artificial Sequence
  Description of Artificial Sequence:  Enzymatic Nucleic Acid
caacctgcggctagctacaacgaggggagtc

SEQ ID NO: 4904 - DNA, 31 bp, Artificial Sequence
  Description of Artificial Sequence:  Enzymatic Nucleic Acid
ggggcaacggctagctacaacgactgcgggg

SEQ ID NO: 4905 - DNA, 31 bp, Artificial Sequence
  Description of Artificial Sequence:  Enzymatic Nucleic Acid
ggcggggcggctagctacaacgaaacctgcg

SEQ ID NO: 4906 - DNA, 31 bp, Artificial Sequence
  Description of Artificial Sequence:  Enzymatic Nucleic Acid
gggcaggcggctagctacaacgaggggcaac

SEQ ID NO: 4907 - DNA, 31 bp, Artificial Sequence
  Description of Artificial Sequence:  Enzymatic Nucleic Acid
gctggggcggctagctacaacgaaggcgggg

SEQ ID NO: 4908 - DNA, 31 bp, Artificial Sequence
  Description of Artificial Sequence:  Enzymatic Nucleic Acid
agtagcgcggctagctacaacgatggggcag

SEQ ID NO: 4909 - DNA, 31 bp, Artificial Sequence
  Description of Artificial Sequence:  Enzymatic Nucleic Acid
ccagtagcggctagctacaacgagctggggc

SEQ ID NO: 4910 - DNA, 31 bp, Artificial Sequence
  Description of Artificial Sequence:  Enzymatic Nucleic Acid
ttgccagtggctagctacaacgaagcgctgg

SEQ ID NO: 4911 - DNA, 31 bp, Artificial Sequence
  Description of Artificial Sequence:  Enzymatic Nucleic Acid
gcatttgcggctagctacaacgacagtagcg

SEQ ID NO: 4912 - DNA, 31 bp, Artificial Sequence
  Description of Artificial Sequence:  Enzymatic Nucleic Acid
ggccgcatggctagctacaacgattgccagt

SEQ ID NO: 4913 - DNA, 31 bp, Artificial Sequence
  Description of Artificial Sequence:  Enzymatic Nucleic Acid
ggggccgcggctagctacaacgaatttgcca

SEQ ID NO: 4914 - DNA, 31 bp, Artificial Sequence
  Description of Artificial Sequence:  Enzymatic Nucleic Acid
acaggggcggctagctacaacgacgcatttg

SEQ ID NO: 4915 - DNA, 31 bp, Artificial Sequence
  Description of Artificial Sequence:  Enzymatic Nucleic Acid
ccagaaacggctagctacaacgaaggggccg

SEQ ID NO: 4916 - DNA, 31 bp, Artificial Sequence
  Description of Artificial Sequence:  Enzymatic Nucleic Acid
caagcagcggctagctacaacgatccagaaa

SEQ ID NO: 4917 - DNA, 31 bp, Artificial Sequence
  Description of Artificial Sequence:  Enzymatic Nucleic Acid
tcccaagcggctagctacaacgaagctccag

SEQ ID NO: 4918 - DNA, 31 bp, Artificial Sequence
  Description of Artificial Sequence:  Enzymatic Nucleic Acid
cgcgtggtggctagctacaacgatcccaagc

SEQ ID NO: 4919 - DNA, 31 bp, Artificial Sequence
  Description of Artificial Sequence:  Enzymatic Nucleic Acid
ctgcgcgtggctagctacaacgaggttccca

SEQ ID NO: 4920 - DNA, 31 bp, Artificial Sequence
  Description of Artificial Sequence:  Enzymatic Nucleic Acid
cactgcgcggctagctacaacgagtggttcc

SEQ ID NO: 4921 - DNA, 31 bp, Artificial Sequence
  Description of Artificial Sequence:  Enzymatic Nucleic Acid
ggcactgcggctagctacaacgagcgtggtt

SEQ ID NO: 4922 - DNA, 31 bp, Artificial Sequence
  Description of Artificial Sequence:  Enzymatic Nucleic Acid
aggggcacggctagctacaacgatgcgcgtg

SEQ ID NO: 4923 - DNA, 31 bp, Artificial Sequence
  Description of Artificial Sequence:  Enzymatic Nucleic Acid
gtaggggcggctagctacaacgaactgcgcg

SEQ ID NO: 4924 - DNA, 31 bp, Artificial Sequence
  Description of Artificial Sequence:  Enzymatic Nucleic Acid
caccccgtggctagctacaacgaaggggcac

SEQ ID NO: 4925 - DNA, 31 bp, Artificial Sequence
  Description of Artificial Sequence:  Enzymatic Nucleic Acid
aggagcacggctagctacaacgacccgtagg

SEQ ID NO: 4926 - DNA, 31 bp, Artificial Sequence
  Description of Artificial Sequence:  Enzymatic Nucleic Acid
tgaggagcggctagctacaacgaaccccgta

SEQ ID NO: 4927 - DNA, 31 bp, Artificial Sequence
  Description of Artificial Sequence:  Enzymatic Nucleic Acid
cagtgcgtggctagctacaacgacttgagga

SEQ ID NO: 4928 - DNA, 31 bp, Artificial Sequence
  Description of Artificial Sequence:  Enzymatic Nucleic Acid
ggcagtgcggctagctacaacgagtcttgag

SEQ ID NO: 4929 - DNA, 31 bp, Artificial Sequence
  Description of Artificial Sequence:  Enzymatic Nucleic Acid
cgggcagtggctagctacaacgagcgtcttg

SEQ ID NO: 4930 - DNA, 31 bp, Artificial Sequence
  Description of Artificial Sequence:  Enzymatic Nucleic Acid
cagcgggcggctagctacaacgaagtgcgtc

SEQ ID NO: 4931 - DNA, 31 bp, Artificial Sequence
  Description of Artificial Sequence:  Enzymatic Nucleic Acid
ctcgcagcggctagctacaacgagggcagtg

SEQ ID NO: 4932 - DNA, 31 bp, Artificial Sequence
  Description of Artificial Sequence:  Enzymatic Nucleic Acid
cagctcgcggctagctacaacgaagcgggca

SEQ ID NO: 4933 - DNA, 31 bp, Artificial Sequence
  Description of Artificial Sequence:  Enzymatic Nucleic Acid
accgcagcggctagctacaacgatcgcagcg

SEQ ID NO: 4934 - DNA, 31 bp, Artificial Sequence
  Description of Artificial Sequence:  Enzymatic Nucleic Acid
gtgaccgcggctagctacaacgaagctcgca

SEQ ID NO: 4935 - DNA, 31 bp, Artificial Sequence
  Description of Artificial Sequence:  Enzymatic Nucleic Acid
ggggtgacggctagctacaacgacgcagctc

SEQ ID NO: 4936 - DNA, 31 bp, Artificial Sequence
  Description of Artificial Sequence:  Enzymatic Nucleic Acid
gctggggtggctagctacaacgagaccgcag

SEQ ID NO: 4937 - DNA, 31 bp, Artificial Sequence
  Description of Artificial Sequence:  Enzymatic Nucleic Acid
ccggctgcggctagctacaacgatggggtga

SEQ ID NO: 4938 - DNA, 31 bp, Artificial Sequence
  Description of Artificial Sequence:  Enzymatic Nucleic Acid
acaccggcggctagctacaacgatgctgggg

SEQ ID NO: 4939 - DNA, 31 bp, Artificial Sequence
  Description of Artificial Sequence:  Enzymatic Nucleic Acid
acagacacggctagctacaacgacggctgct

SEQ ID NO: 4940 - DNA, 31 bp, Artificial Sequence
  Description of Artificial Sequence:  Enzymatic Nucleic Acid
gcacagacggctagctacaacgaaccggctg

SEQ ID NO: 4941 - DNA, 31 bp, Artificial Sequence
  Description of Artificial Sequence:  Enzymatic Nucleic Acid
ccgggcacggctagctacaacgaagacaccg

SEQ ID NO: 4942 - DNA, 31 bp, Artificial Sequence
  Description of Artificial Sequence:  Enzymatic Nucleic Acid
tcccgggcggctagctacaacgaacagacac

SEQ ID NO: 4943 - DNA, 31 bp, Artificial Sequence
  Description of Artificial Sequence:  Enzymatic Nucleic Acid
cctggggcggctagctacaacgattctcccg

SEQ ID NO: 4944 - DNA, 31 bp, Artificial Sequence
  Description of Artificial Sequence:  Enzymatic Nucleic Acid
cacagagcggctagctacaacgacctggggc

SEQ ID NO: 4945 - DNA, 31 bp, Artificial Sequence
  Description of Artificial Sequence:  Enzymatic Nucleic Acid
gccgccacggctagctacaacgaagagccct

SEQ ID NO: 4946 - DNA, 31 bp, Artificial Sequence
  Description of Artificial Sequence:  Enzymatic Nucleic Acid
ggggccgcggctagctacaacgacacagagc

SEQ ID NO: 4947 - DNA, 31 bp, Artificial Sequence
  Description of Artificial Sequence:  Enzymatic Nucleic Acid
tcgggggcggctagctacaacgacgccacag

SEQ ID NO: 4948 - DNA, 31 bp, Artificial Sequence
  Description of Artificial Sequence:  Enzymatic Nucleic Acid
gtctgtgtggctagctacaacgacctcctcc

SEQ ID NO: 4949 - DNA, 31 bp, Artificial Sequence
  Description of Artificial Sequence:  Enzymatic Nucleic Acid
gggtctgtggctagctacaacgagtcctcct

SEQ ID NO: 4950 - DNA, 31 bp, Artificial Sequence
  Description of Artificial Sequence:  Enzymatic Nucleic Acid
acgggggtggctagctacaacgactgtgtcc

SEQ ID NO: 4951 - DNA, 31 bp, Artificial Sequence
  Description of Artificial Sequence:  Enzymatic Nucleic Acid
caggcgacggctagctacaacgagggggtct

SEQ ID NO: 4952 - DNA, 31 bp, Artificial Sequence
  Description of Artificial Sequence:  Enzymatic Nucleic Acid
caccaggcggctagctacaacgagacggggg

SEQ ID NO: 4953 - DNA, 31 bp, Artificial Sequence
  Description of Artificial Sequence:  Enzymatic Nucleic Acid
agctgcacggctagctacaacgacaggcgac

SEQ ID NO: 4954 - DNA, 31 bp, Artificial Sequence
  Description of Artificial Sequence:  Enzymatic Nucleic Acid
gcagctgcggctagctacaacgaaccaggcg

SEQ ID NO: 4955 - DNA, 31 bp, Artificial Sequence
  Description of Artificial Sequence:  Enzymatic Nucleic Acid
ggagcagcggctagctacaacgatgcaccag

SEQ ID NO: 4956 - DNA, 31 bp, Artificial Sequence
  Description of Artificial Sequence:  Enzymatic Nucleic Acid
ggcggagcggctagctacaacgaagctgcac

SEQ ID NO: 4957 - DNA, 31 bp, Artificial Sequence
  Description of Artificial Sequence:  Enzymatic Nucleic Acid
gtgctggcggctagctacaacgaggagcagc

SEQ ID NO: 4958 - DNA, 31 bp, Artificial Sequence
  Description of Artificial Sequence:  Enzymatic Nucleic Acid
tgctgtgcggctagctacaacgatggcggag

SEQ ID NO: 4959 - DNA, 31 bp, Artificial Sequence
  Description of Artificial Sequence:  Enzymatic Nucleic Acid
gctgctgtggctagctacaacgagctggcgg

SEQ ID NO: 4960 - DNA, 31 bp, Artificial Sequence
  Description of Artificial Sequence:  Enzymatic Nucleic Acid
ggggctgcggctagctacaacgatgtgctgg

SEQ ID NO: 4961 - DNA, 31 bp, Artificial Sequence
  Description of Artificial Sequence:  Enzymatic Nucleic Acid
ccaggggcggctagctacaacgatgctgtgc

SEQ ID NO: 4962 - DNA, 31 bp, Artificial Sequence
  Description of Artificial Sequence:  Enzymatic Nucleic Acid
acacctgcggctagctacaacgacaggggct

SEQ ID NO: 4963 - DNA, 31 bp, Artificial Sequence
  Description of Artificial Sequence:  Enzymatic Nucleic Acid
ccgtacacggctagctacaacgactgccagg

SEQ ID NO: 4964 - DNA, 31 bp, Artificial Sequence
  Description of Artificial Sequence:  Enzymatic Nucleic Acid
agccgtacggctagctacaacgaacctgcca

SEQ ID NO: 4965 - DNA, 31 bp, Artificial Sequence
  Description of Artificial Sequence:  Enzymatic Nucleic Acid
gaagccgtggctagctacaacgaacacctgc

SEQ ID NO: 4966 - DNA, 31 bp, Artificial Sequence
  Description of Artificial Sequence:  Enzymatic Nucleic Acid
cacgaagcggctagctacaacgacgtacacc

SEQ ID NO: 4967 - DNA, 31 bp, Artificial Sequence
  Description of Artificial Sequence:  Enzymatic Nucleic Acid
gcccgcacggctagctacaacgagaagccgt

SEQ ID NO: 4968 - DNA, 31 bp, Artificial Sequence
  Description of Artificial Sequence:  Enzymatic Nucleic Acid
aggcccgcggctagctacaacgaacgaagcc

SEQ ID NO: 4969 - DNA, 31 bp, Artificial Sequence
  Description of Artificial Sequence:  Enzymatic Nucleic Acid
aggcaggcggctagctacaacgaccgcacga

SEQ ID NO: 4970 - DNA, 31 bp, Artificial Sequence
  Description of Artificial Sequence:  Enzymatic Nucleic Acid
gcgcaggcggctagctacaacgaaggcccgc

SEQ ID NO: 4971 - DNA, 31 bp, Artificial Sequence
  Description of Artificial Sequence:  Enzymatic Nucleic Acid
gccggcgcggctagctacaacgaaggcaggc

SEQ ID NO: 4972 - DNA, 31 bp, Artificial Sequence
  Description of Artificial Sequence:  Enzymatic Nucleic Acid
cagccggcggctagctacaacgagcaggcag

SEQ ID NO: 4973 - DNA, 31 bp, Artificial Sequence
  Description of Artificial Sequence:  Enzymatic Nucleic Acid
gcaccagcggctagctacaacgacggcgcag

SEQ ID NO: 4974 - DNA, 31 bp, Artificial Sequence
  Description of Artificial Sequence:  Enzymatic Nucleic Acid
gggggcacggctagctacaacgacagccggc

SEQ ID NO: 4975 - DNA, 31 bp, Artificial Sequence
  Description of Artificial Sequence:  Enzymatic Nucleic Acid
ctgggggcggctagctacaacgaaccagccg

SEQ ID NO: 4976 - DNA, 31 bp, Artificial Sequence
  Description of Artificial Sequence:  Enzymatic Nucleic Acid
ccagaggcggctagctacaacgactgggggc

SEQ ID NO: 4977 - DNA, 31 bp, Artificial Sequence
  Description of Artificial Sequence:  Enzymatic Nucleic Acid
cctggagcggctagctacaacgacccagagg

SEQ ID NO: 4978 - DNA, 31 bp, Artificial Sequence
  Description of Artificial Sequence:  Enzymatic Nucleic Acid
cgttgtgcggctagctacaacgactggagcc

SEQ ID NO: 4979 - DNA, 31 bp, Artificial Sequence
  Description of Artificial Sequence:  Enzymatic Nucleic Acid
ttcgttgtggctagctacaacgagcctggag

SEQ ID NO: 4980 - DNA, 31 bp, Artificial Sequence
  Description of Artificial Sequence:  Enzymatic Nucleic Acid
gcgttcgtggctagctacaacgatgtgcctg

SEQ ID NO: 4981 - DNA, 31 bp, Artificial Sequence
  Description of Artificial Sequence:  Enzymatic Nucleic Acid
agcggcgtggctagctacaacgatcgttgtg

SEQ ID NO: 4982 - DNA, 31 bp, Artificial Sequence
  Description of Artificial Sequence:  Enzymatic Nucleic Acid
gaagcggcggctagctacaacgagttcgttg

SEQ ID NO: 4983 - DNA, 31 bp, Artificial Sequence
  Description of Artificial Sequence:  Enzymatic Nucleic Acid
gaggaagcggctagctacaacgaggcgttcg

SEQ ID NO: 4984 - DNA, 31 bp, Artificial Sequence
  Description of Artificial Sequence:  Enzymatic Nucleic Acid
cttggtgtggctagctacaacgatcctgagg

SEQ ID NO: 4985 - DNA, 31 bp, Artificial Sequence
  Description of Artificial Sequence:  Enzymatic Nucleic Acid
ttcttggtggctagctacaacgagttcctga

SEQ ID NO: 4986 - DNA, 31 bp, Artificial Sequence
  Description of Artificial Sequence:  Enzymatic Nucleic Acid
agatgaacggctagctacaacgattcttggt

SEQ ID NO: 4987 - DNA, 31 bp, Artificial Sequence
  Description of Artificial Sequence:  Enzymatic Nucleic Acid
agggagatggctagctacaacgagaacttct

SEQ ID NO: 4988 - DNA, 31 bp, Artificial Sequence
  Description of Artificial Sequence:  Enzymatic Nucleic Acid
tggcatgcggctagctacaacgattccccag

SEQ ID NO: 4989 - DNA, 31 bp, Artificial Sequence
  Description of Artificial Sequence:  Enzymatic Nucleic Acid
cttggcatggctagctacaacgagcttcccc

SEQ ID NO: 4990 - DNA, 31 bp, Artificial Sequence
  Description of Artificial Sequence:  Enzymatic Nucleic Acid
agcttggcggctagctacaacgaatgcttcc

SEQ ID NO: 4991 - DNA, 31 bp, Artificial Sequence
  Description of Artificial Sequence:  Enzymatic Nucleic Acid
gcgagagcggctagctacaacgattggcatg

SEQ ID NO: 4992 - DNA, 31 bp, Artificial Sequence
  Description of Artificial Sequence:  Enzymatic Nucleic Acid
cctgcagcggctagctacaacgagagagctt

SEQ ID NO: 4993 - DNA, 31 bp, Artificial Sequence
  Description of Artificial Sequence:  Enzymatic Nucleic Acid
gctcctgcggctagctacaacgaagcgagag

SEQ ID NO: 4994 - DNA, 31 bp, Artificial Sequence
  Description of Artificial Sequence:  Enzymatic Nucleic Acid
acgtcagcggctagctacaacgatcctgcag

SEQ ID NO: 4995 - DNA, 31 bp, Artificial Sequence
  Description of Artificial Sequence:  Enzymatic Nucleic Acid
ttccacgtggctagctacaacgacagctcct

SEQ ID NO: 4996 - DNA, 31 bp, Artificial Sequence
  Description of Artificial Sequence:  Enzymatic Nucleic Acid
tcttccacggctagctacaacgagtcagctc

SEQ ID NO: 4997 - DNA, 31 bp, Artificial Sequence
  Description of Artificial Sequence:  Enzymatic Nucleic Acid
acgctcatggctagctacaacgacttccacg

SEQ ID NO: 4998 - DNA, 31 bp, Artificial Sequence
  Description of Artificial Sequence:  Enzymatic Nucleic Acid
ccgcacgcggctagctacaacgatcatcttc

SEQ ID NO: 4999 - DNA, 31 bp, Artificial Sequence
  Description of Artificial Sequence:  Enzymatic Nucleic Acid
tcccgcacggctagctacaacgagctcatct

SEQ ID NO: 5000 - DNA, 31 bp, Artificial Sequence
  Description of Artificial Sequence:  Enzymatic Nucleic Acid
agtcccgcggctagctacaacgaacgctcat

SEQ ID NO: 5001 - DNA, 31 bp, Artificial Sequence
  Description of Artificial Sequence:  Enzymatic Nucleic Acid
agcgcagtggctagctacaacgacccgcacg

SEQ ID NO: 5002 - DNA, 31 bp, Artificial Sequence
  Description of Artificial Sequence:  Enzymatic Nucleic Acid
ccaagcgcggctagctacaacgaagtcccgc

SEQ ID NO: 5003 - DNA, 31 bp, Artificial Sequence
  Description of Artificial Sequence:  Enzymatic Nucleic Acid
agccaagcggctagctacaacgagcagtccc

SEQ ID NO: 5004 - DNA, 31 bp, Artificial Sequence
  Description of Artificial Sequence:  Enzymatic Nucleic Acid
tgcgcagcggctagctacaacgacaagcgca

SEQ ID NO: 5005 - DNA, 31 bp, Artificial Sequence
  Description of Artificial Sequence:  Enzymatic Nucleic Acid
tcctgcgcggctagctacaacgaagccaagc

SEQ ID NO: 5006 - DNA, 31 bp, Artificial Sequence
  Description of Artificial Sequence:  Enzymatic Nucleic Acid
gctcctgcggctagctacaacgagcagccaa

SEQ ID NO: 5007 - DNA, 31 bp, Artificial Sequence
  Description of Artificial Sequence:  Enzymatic Nucleic Acid
ccctgggcggctagctacaacgatcctgcgc

SEQ ID NO: 5008 - DNA, 31 bp, Artificial Sequence
  Description of Artificial Sequence:  Enzymatic Nucleic Acid
cagccaacggctagctacaacgaccctgggc

SEQ ID NO: 5009 - DNA, 31 bp, Artificial Sequence
  Description of Artificial Sequence:  Enzymatic Nucleic Acid
aacacagcggctagctacaacgacaacccct

SEQ ID NO: 5010 - DNA, 31 bp, Artificial Sequence
  Description of Artificial Sequence:  Enzymatic Nucleic Acid
cggaacacggctagctacaacgaagccaacc

SEQ ID NO: 5011 - DNA, 31 bp, Artificial Sequence
  Description of Artificial Sequence:  Enzymatic Nucleic Acid
gccggaacggctagctacaacgaacagccaa

SEQ ID NO: 5012 - DNA, 31 bp, Artificial Sequence
  Description of Artificial Sequence:  Enzymatic Nucleic Acid
tctgcggcggctagctacaacgacggaacac

SEQ ID NO: 5013 - DNA, 31 bp, Artificial Sequence
  Description of Artificial Sequence:  Enzymatic Nucleic Acid
tgctctgcggctagctacaacgaggccggaa

SEQ ID NO: 5014 - DNA, 31 bp, Artificial Sequence
  Description of Artificial Sequence:  Enzymatic Nucleic Acid
gacggtgcggctagctacaacgatctgcggc

SEQ ID NO: 5015 - DNA, 31 bp, Artificial Sequence
  Description of Artificial Sequence:  Enzymatic Nucleic Acid
cagacggtggctagctacaacgagctctgcg

SEQ ID NO: 5016 - DNA, 31 bp, Artificial Sequence
  Description of Artificial Sequence:  Enzymatic Nucleic Acid
acgcagacggctagctacaacgaggtgctct

SEQ ID NO: 5017 - DNA, 31 bp, Artificial Sequence
  Description of Artificial Sequence:  Enzymatic Nucleic Acid
cctcacgcggctagctacaacgaagacggtg

SEQ ID NO: 5018 - DNA, 31 bp, Artificial Sequence
  Description of Artificial Sequence:  Enzymatic Nucleic Acid
ctcctcacggctagctacaacgagcagacgg

SEQ ID NO: 5019 - DNA, 31 bp, Artificial Sequence
  Description of Artificial Sequence:  Enzymatic Nucleic Acid
gccaggatggctagctacaacgactcctcac

SEQ ID NO: 5020 - DNA, 31 bp, Artificial Sequence
  Description of Artificial Sequence:  Enzymatic Nucleic Acid
aacttggcggctagctacaacgacaggatct

SEQ ID NO: 5021 - DNA, 31 bp, Artificial Sequence
  Description of Artificial Sequence:  Enzymatic Nucleic Acid
gcaggaacggctagctacaacgattggccag

SEQ ID NO: 5022 - DNA, 31 bp, Artificial Sequence
  Description of Artificial Sequence:  Enzymatic Nucleic Acid
gccagtgcggctagctacaacgaaggaactt

SEQ ID NO: 5023 - DNA, 31 bp, Artificial Sequence
  Description of Artificial Sequence:  Enzymatic Nucleic Acid
cagccagtggctagctacaacgagcaggaac

SEQ ID NO: 5024 - DNA, 31 bp, Artificial Sequence
  Description of Artificial Sequence:  Enzymatic Nucleic Acid
tcatcagcggctagctacaacgacagtgcag

SEQ ID NO: 5025 - DNA, 31 bp, Artificial Sequence
  Description of Artificial Sequence:  Enzymatic Nucleic Acid
acactcatggctagctacaacgacagccagt

SEQ ID NO: 5026 - DNA, 31 bp, Artificial Sequence
  Description of Artificial Sequence:  Enzymatic Nucleic Acid
gtacacacggctagctacaacgatcatcagc

SEQ ID NO: 5027 - DNA, 31 bp, Artificial Sequence
  Description of Artificial Sequence:  Enzymatic Nucleic Acid
acgtacacggctagctacaacgaactcatca

SEQ ID NO: 5028 - DNA, 31 bp, Artificial Sequence
  Description of Artificial Sequence:  Enzymatic Nucleic Acid
cgacgtacggctagctacaacgaacactcat

SEQ ID NO: 5029 - DNA, 31 bp, Artificial Sequence
  Description of Artificial Sequence:  Enzymatic Nucleic Acid
gacgacgtggctagctacaacgaacacactc

SEQ ID NO: 5030 - DNA, 31 bp, Artificial Sequence
  Description of Artificial Sequence:  Enzymatic Nucleic Acid
tcgacgacggctagctacaacgagtacacac

SEQ ID NO: 5031 - DNA, 31 bp, Artificial Sequence
  Description of Artificial Sequence:  Enzymatic Nucleic Acid
agctcgacggctagctacaacgagacgtaca

SEQ ID NO: 5032 - DNA, 31 bp, Artificial Sequence
  Description of Artificial Sequence:  Enzymatic Nucleic Acid
tgagcagcggctagctacaacgatcgacgac

SEQ ID NO: 5033 - DNA, 31 bp, Artificial Sequence
  Description of Artificial Sequence:  Enzymatic Nucleic Acid
acctgagcggctagctacaacgaagctcgac

SEQ ID NO: 5034 - DNA, 31 bp, Artificial Sequence
  Description of Artificial Sequence:  Enzymatic Nucleic Acid
agaaagacggctagctacaacgactgagcag

SEQ ID NO: 5035 - DNA, 31 bp, Artificial Sequence
  Description of Artificial Sequence:  Enzymatic Nucleic Acid
cgtgacatggctagctacaacgaaaaagaaa

SEQ ID NO: 5036 - DNA, 31 bp, Artificial Sequence
  Description of Artificial Sequence:  Enzymatic Nucleic Acid
tccgtgacggctagctacaacgaataaaaga

SEQ ID NO: 5037 - DNA, 31 bp, Artificial Sequence
  Description of Artificial Sequence:  Enzymatic Nucleic Acid
gtctccgtggctagctacaacgagacataaa

SEQ ID NO: 5038 - DNA, 31 bp, Artificial Sequence
  Description of Artificial Sequence:  Enzymatic Nucleic Acid
aacgtggtggctagctacaacgactccgtga

SEQ ID NO: 5039 - DNA, 31 bp, Artificial Sequence
  Description of Artificial Sequence:  Enzymatic Nucleic Acid
tgaaacgtggctagctacaacgaggtctccg

SEQ ID NO: 5040 - DNA, 31 bp, Artificial Sequence
  Description of Artificial Sequence:  Enzymatic Nucleic Acid
tttgaaacggctagctacaacgagtggtctc

SEQ ID NO: 5041 - DNA, 31 bp, Artificial Sequence
  Description of Artificial Sequence:  Enzymatic Nucleic Acid
gagcctgtggctagctacaacgatcttttga

SEQ ID NO: 5042 - DNA, 31 bp, Artificial Sequence
  Description of Artificial Sequence:  Enzymatic Nucleic Acid
aaaagagcggctagctacaacgactgttctt

SEQ ID NO: 5043 - DNA, 31 bp, Artificial Sequence
  Description of Artificial Sequence:  Enzymatic Nucleic Acid
cttccggtggctagctacaacgaagaaaaag

SEQ ID NO: 5044 - DNA, 31 bp, Artificial Sequence
  Description of Artificial Sequence:  Enzymatic Nucleic Acid
ccagacacggctagctacaacgatcttccgg

SEQ ID NO: 5045 - DNA, 31 bp, Artificial Sequence
  Description of Artificial Sequence:  Enzymatic Nucleic Acid
ctccagacggctagctacaacgaactcttcc

SEQ ID NO: 5046 - DNA, 31 bp, Artificial Sequence
  Description of Artificial Sequence:  Enzymatic Nucleic Acid
caacttgcggctagctacaacgatccagaca

SEQ ID NO: 5047 - DNA, 31 bp, Artificial Sequence
  Description of Artificial Sequence:  Enzymatic Nucleic Acid
tttgcaacggctagctacaacgattgctcca

SEQ ID NO: 5048 - DNA, 31 bp, Artificial Sequence
  Description of Artificial Sequence:  Enzymatic Nucleic Acid
tgctttgcggctagctacaacgaaacttgct

SEQ ID NO: 5049 - DNA, 31 bp, Artificial Sequence
  Description of Artificial Sequence:  Enzymatic Nucleic Acid
tccaatgcggctagctacaacgatttgcaac

SEQ ID NO: 5050 - DNA, 31 bp, Artificial Sequence
  Description of Artificial Sequence:  Enzymatic Nucleic Acid
attccaatggctagctacaacgagctttgca

SEQ ID NO: 5051 - DNA, 31 bp, Artificial Sequence
  Description of Artificial Sequence:  Enzymatic Nucleic Acid
tgtctgatggctagctacaacgatccaatgc

SEQ ID NO: 5052 - DNA, 31 bp, Artificial Sequence
  Description of Artificial Sequence:  Enzymatic Nucleic Acid
agtgctgtggctagctacaacgactgattcc

SEQ ID NO: 5053 - DNA, 31 bp, Artificial Sequence
  Description of Artificial Sequence:  Enzymatic Nucleic Acid
tcaagtgcggctagctacaacgatgtctgat

SEQ ID NO: 5054 - DNA, 31 bp, Artificial Sequence
  Description of Artificial Sequence:  Enzymatic Nucleic Acid
cttcaagtggctagctacaacgagctgtctg

SEQ ID NO: 5055 - DNA, 31 bp, Artificial Sequence
  Description of Artificial Sequence:  Enzymatic Nucleic Acid
agctgcacggctagctacaacgacctcttca

SEQ ID NO: 5056 - DNA, 31 bp, Artificial Sequence
  Description of Artificial Sequence:  Enzymatic Nucleic Acid
gcagctgcggctagctacaacgaaccctctt

SEQ ID NO: 5057 - DNA, 31 bp, Artificial Sequence
  Description of Artificial Sequence:  Enzymatic Nucleic Acid
cccgcagcggctagctacaacgatgcaccct

SEQ ID NO: 5058 - DNA, 31 bp, Artificial Sequence
  Description of Artificial Sequence:  Enzymatic Nucleic Acid
gctcccgcggctagctacaacgaagctgcac

SEQ ID NO: 5059 - DNA, 31 bp, Artificial Sequence
  Description of Artificial Sequence:  Enzymatic Nucleic Acid
ccgacagcggctagctacaacgatcccgcag

SEQ ID NO: 5060 - DNA, 31 bp, Artificial Sequence
  Description of Artificial Sequence:  Enzymatic Nucleic Acid
cttccgacggctagctacaacgaagctcccg

SEQ ID NO: 5061 - DNA, 31 bp, Artificial Sequence
  Description of Artificial Sequence:  Enzymatic Nucleic Acid
acctctgcggctagctacaacgattccgaca

SEQ ID NO: 5062 - DNA, 31 bp, Artificial Sequence
  Description of Artificial Sequence:  Enzymatic Nucleic Acid
tgcctgacggctagctacaacgactctgctt

SEQ ID NO: 5063 - DNA, 31 bp, Artificial Sequence
  Description of Artificial Sequence:  Enzymatic Nucleic Acid
gatgctgcggctagctacaacgactgacctc

SEQ ID NO: 5064 - DNA, 31 bp, Artificial Sequence
  Description of Artificial Sequence:  Enzymatic Nucleic Acid
cccgatgcggctagctacaacgatgcctgac

SEQ ID NO: 5065 - DNA, 31 bp, Artificial Sequence
  Description of Artificial Sequence:  Enzymatic Nucleic Acid
ttcccgatggctagctacaacgagctgcctg

SEQ ID NO: 5066 - DNA, 31 bp, Artificial Sequence
  Description of Artificial Sequence:  Enzymatic Nucleic Acid
ggcctggcggctagctacaacgattcccgat

SEQ ID NO: 5067 - DNA, 31 bp, Artificial Sequence
  Description of Artificial Sequence:  Enzymatic Nucleic Acid
gggcgggcggctagctacaacgactggcttc

SEQ ID NO: 5068 - DNA, 31 bp, Artificial Sequence
  Description of Artificial Sequence:  Enzymatic Nucleic Acid
agcagggcggctagctacaacgagggcctgg

SEQ ID NO: 5069 - DNA, 31 bp, Artificial Sequence
  Description of Artificial Sequence:  Enzymatic Nucleic Acid
acgtcagcggctagctacaacgaagggcggg

SEQ ID NO: 5070 - DNA, 31 bp, Artificial Sequence
  Description of Artificial Sequence:  Enzymatic Nucleic Acid
ctggacgtggctagctacaacgacagcaggg

SEQ ID NO: 5071 - DNA, 31 bp, Artificial Sequence
  Description of Artificial Sequence:  Enzymatic Nucleic Acid
gtctggacggctagctacaacgagtcagcag

SEQ ID NO: 5072 - DNA, 31 bp, Artificial Sequence
  Description of Artificial Sequence:  Enzymatic Nucleic Acid
agcggagtggctagctacaacgactggacgt

SEQ ID NO: 5073 - DNA, 31 bp, Artificial Sequence
  Description of Artificial Sequence:  Enzymatic Nucleic Acid
gatgaagcggctagctacaacgaggagtctg

SEQ ID NO: 5074 - DNA, 31 bp, Artificial Sequence
  Description of Artificial Sequence:  Enzymatic Nucleic Acid
ttggggatggctagctacaacgagaagcgga

SEQ ID NO: 5075 - DNA, 31 bp, Artificial Sequence
  Description of Artificial Sequence:  Enzymatic Nucleic Acid
cgtcaggcggctagctacaacgattggggat

SEQ ID NO: 5076 - DNA, 31 bp, Artificial Sequence
  Description of Artificial Sequence:  Enzymatic Nucleic Acid
cagcccgtggctagctacaacgacaggcttg

SEQ ID NO: 5077 - DNA, 31 bp, Artificial Sequence
  Description of Artificial Sequence:  Enzymatic Nucleic Acid
gccgcagcggctagctacaacgaccgtcagg

SEQ ID NO: 5078 - DNA, 31 bp, Artificial Sequence
  Description of Artificial Sequence:  Enzymatic Nucleic Acid
tcggccgcggctagctacaacgaagcccgtc

SEQ ID NO: 5079 - DNA, 31 bp, Artificial Sequence
  Description of Artificial Sequence:  Enzymatic Nucleic Acid
caatcggcggctagctacaacgacgcagccc

SEQ ID NO: 5080 - DNA, 31 bp, Artificial Sequence
  Description of Artificial Sequence:  Enzymatic Nucleic Acid
ttcacaatggctagctacaacgacggccgca

SEQ ID NO: 5081 - DNA, 31 bp, Artificial Sequence
  Description of Artificial Sequence:  Enzymatic Nucleic Acid
atgttcacggctagctacaacgaaatcggcc

SEQ ID NO: 5082 - DNA, 31 bp, Artificial Sequence
  Description of Artificial Sequence:  Enzymatic Nucleic Acid
gtccatgtggctagctacaacgatcacaatc

SEQ ID NO: 5083 - DNA, 31 bp, Artificial Sequence
  Description of Artificial Sequence:  Enzymatic Nucleic Acid
tagtccatggctagctacaacgagttcacaa

SEQ ID NO: 5084 - DNA, 31 bp, Artificial Sequence
  Description of Artificial Sequence:  Enzymatic Nucleic Acid
gacgtagtggctagctacaacgaccatgttc

SEQ ID NO: 5085 - DNA, 31 bp, Artificial Sequence
  Description of Artificial Sequence:  Enzymatic Nucleic Acid
cacgacgtggctagctacaacgaagtccatg

SEQ ID NO: 5086 - DNA, 31 bp, Artificial Sequence
  Description of Artificial Sequence:  Enzymatic Nucleic Acid
cccacgacggctagctacaacgagtagtcca

SEQ ID NO: 5087 - DNA, 31 bp, Artificial Sequence
  Description of Artificial Sequence:  Enzymatic Nucleic Acid
gctcccacggctagctacaacgagacgtagt

SEQ ID NO: 5088 - DNA, 31 bp, Artificial Sequence
  Description of Artificial Sequence:  Enzymatic Nucleic Acid
gttctggcggctagctacaacgatcccacga

SEQ ID NO: 5089 - DNA, 31 bp, Artificial Sequence
  Description of Artificial Sequence:  Enzymatic Nucleic Acid
cggaacgtggctagctacaacgatctggctc

SEQ ID NO: 5090 - DNA, 31 bp, Artificial Sequence
  Description of Artificial Sequence:  Enzymatic Nucleic Acid
tgcggaacggctagctacaacgagttctggc

SEQ ID NO: 5091 - DNA, 31 bp, Artificial Sequence
  Description of Artificial Sequence:  Enzymatic Nucleic Acid
ttctctgcggctagctacaacgaggaacgtt

SEQ ID NO: 5092 - DNA, 31 bp, Artificial Sequence
  Description of Artificial Sequence:  Enzymatic Nucleic Acid
cgctcggcggctagctacaacgacctctttt

SEQ ID NO: 5093 - DNA, 31 bp, Artificial Sequence
  Description of Artificial Sequence:  Enzymatic Nucleic Acid
tgagacgcggctagctacaacgatcggccct

SEQ ID NO: 5094 - DNA, 31 bp, Artificial Sequence
  Description of Artificial Sequence:  Enzymatic Nucleic Acid
ggtgagacggctagctacaacgagctcggcc

SEQ ID NO: 5095 - DNA, 31 bp, Artificial Sequence
  Description of Artificial Sequence:  Enzymatic Nucleic Acid
ctcgaggtggctagctacaacgagagacgct

SEQ ID NO: 5096 - DNA, 31 bp, Artificial Sequence
  Description of Artificial Sequence:  Enzymatic Nucleic Acid
gccttcacggctagctacaacgacctcgagg

SEQ ID NO: 5097 - DNA, 31 bp, Artificial Sequence
  Description of Artificial Sequence:  Enzymatic Nucleic Acid
aacagtgcggctagctacaacgacttcaccc

SEQ ID NO: 5098 - DNA, 31 bp, Artificial Sequence
  Description of Artificial Sequence:  Enzymatic Nucleic Acid
tgaacagtggctagctacaacgagccttcac

SEQ ID NO: 5099 - DNA, 31 bp, Artificial Sequence
  Description of Artificial Sequence:  Enzymatic Nucleic Acid
cgctgaacggctagctacaacgaagtgcctt

SEQ ID NO: 5100 - DNA, 31 bp, Artificial Sequence
  Description of Artificial Sequence:  Enzymatic Nucleic Acid
gagcacgcggctagctacaacgatgaacagt

SEQ ID NO: 5101 - DNA, 31 bp, Artificial Sequence
  Description of Artificial Sequence:  Enzymatic Nucleic Acid
ttgagcacggctagctacaacgagctgaaca

SEQ ID NO: 5102 - DNA, 31 bp, Artificial Sequence
  Description of Artificial Sequence:  Enzymatic Nucleic Acid
agttgagcggctagctacaacgaacgctgaa

SEQ ID NO: 5103 - DNA, 31 bp, Artificial Sequence
  Description of Artificial Sequence:  Enzymatic Nucleic Acid
ctcgtagtggctagctacaacgatgagcacg

SEQ ID NO: 5104 - DNA, 31 bp, Artificial Sequence
  Description of Artificial Sequence:  Enzymatic Nucleic Acid
ccgctcgtggctagctacaacgaagttgagc

SEQ ID NO: 5105 - DNA, 31 bp, Artificial Sequence
  Description of Artificial Sequence:  Enzymatic Nucleic Acid
gcgcccgcggctagctacaacgatcgtagtt

SEQ ID NO: 5106 - DNA, 31 bp, Artificial Sequence
  Description of Artificial Sequence:  Enzymatic Nucleic Acid
cgccgcgcggctagctacaacgaccgctcgt

SEQ ID NO: 5107 - DNA, 31 bp, Artificial Sequence
  Description of Artificial Sequence:  Enzymatic Nucleic Acid
ggcgccgcggctagctacaacgagcccgctc

SEQ ID NO: 5108 - DNA, 31 bp, Artificial Sequence
  Description of Artificial Sequence:  Enzymatic Nucleic Acid
cggggcgcggctagctacaacgacgcgcccg

SEQ ID NO: 5109 - DNA, 31 bp, Artificial Sequence
  Description of Artificial Sequence:  Enzymatic Nucleic Acid
gccggggcggctagctacaacgagccgcgcc

SEQ ID NO: 5110 - DNA, 31 bp, Artificial Sequence
  Description of Artificial Sequence:  Enzymatic Nucleic Acid
caggaggcggctagctacaacgacggggcgc

SEQ ID NO: 5111 - DNA, 31 bp, Artificial Sequence
  Description of Artificial Sequence:  Enzymatic Nucleic Acid
agaggcgcggctagctacaacgaccaggagg

SEQ ID NO: 5112 - DNA, 31 bp, Artificial Sequence
  Description of Artificial Sequence:  Enzymatic Nucleic Acid
acagaggcggctagctacaacgagcccagga

SEQ ID NO: 5113 - DNA, 31 bp, Artificial Sequence
  Description of Artificial Sequence:  Enzymatic Nucleic Acid
cccagcacggctagctacaacgaagaggcgc

SEQ ID NO: 5114 - DNA, 31 bp, Artificial Sequence
  Description of Artificial Sequence:  Enzymatic Nucleic Acid
ggcccagcggctagctacaacgaacagaggc

SEQ ID NO: 5115 - DNA, 31 bp, Artificial Sequence
  Description of Artificial Sequence:  Enzymatic Nucleic Acid
gtccaggcggctagctacaacgaccagcaca

SEQ ID NO: 5116 - DNA, 31 bp, Artificial Sequence
  Description of Artificial Sequence:  Enzymatic Nucleic Acid
gatatcgtggctagctacaacgaccaggccc

SEQ ID NO: 5117 - DNA, 31 bp, Artificial Sequence
  Description of Artificial Sequence:  Enzymatic Nucleic Acid
gtggatatggctagctacaacgacgtccagg

SEQ ID NO: 5118 - DNA, 31 bp, Artificial Sequence
  Description of Artificial Sequence:  Enzymatic Nucleic Acid
ctgtggatggctagctacaacgaatcgtcca

SEQ ID NO: 5119 - DNA, 31 bp, Artificial Sequence
  Description of Artificial Sequence:  Enzymatic Nucleic Acid
ggccctgtggctagctacaacgaggatatcg

SEQ ID NO: 5120 - DNA, 31 bp, Artificial Sequence
  Description of Artificial Sequence:  Enzymatic Nucleic Acid
cgccaggcggctagctacaacgacctgtgga

SEQ ID NO: 5121 - DNA, 31 bp, Artificial Sequence
  Description of Artificial Sequence:  Enzymatic Nucleic Acid
aggtgcgcggctagctacaacgacaggccct

SEQ ID NO: 5122 - DNA, 31 bp, Artificial Sequence
  Description of Artificial Sequence:  Enzymatic Nucleic Acid
gaaggtgcggctagctacaacgagccaggcc

SEQ ID NO: 5123 - DNA, 31 bp, Artificial Sequence
  Description of Artificial Sequence:  Enzymatic Nucleic Acid
acgaaggtggctagctacaacgagcgccagg

SEQ ID NO: 5124 - DNA, 31 bp, Artificial Sequence
  Description of Artificial Sequence:  Enzymatic Nucleic Acid
cgcagcacggctagctacaacgagaaggtgc

SEQ ID NO: 5125 - DNA, 31 bp, Artificial Sequence
  Description of Artificial Sequence:  Enzymatic Nucleic Acid
cacgcagcggctagctacaacgaacgaaggt

SEQ ID NO: 5126 - DNA, 31 bp, Artificial Sequence
  Description of Artificial Sequence:  Enzymatic Nucleic Acid
gcacacgcggctagctacaacgaagcacgaa

SEQ ID NO: 5127 - DNA, 31 bp, Artificial Sequence
  Description of Artificial Sequence:  Enzymatic Nucleic Acid
ccgcacacggctagctacaacgagcagcacg

SEQ ID NO: 5128 - DNA, 31 bp, Artificial Sequence
  Description of Artificial Sequence:  Enzymatic Nucleic Acid
gcccgcacggctagctacaacgaacgcagca

SEQ ID NO: 5129 - DNA, 31 bp, Artificial Sequence
  Description of Artificial Sequence:  Enzymatic Nucleic Acid
gggcccgcggctagctacaacgaacacgcag

SEQ ID NO: 5130 - DNA, 31 bp, Artificial Sequence
  Description of Artificial Sequence:  Enzymatic Nucleic Acid
tcctgggcggctagctacaacgaccgcacac

SEQ ID NO: 5131 - DNA, 31 bp, Artificial Sequence
  Description of Artificial Sequence:  Enzymatic Nucleic Acid
cggcgggtggctagctacaacgacctgggcc

SEQ ID NO: 5132 - DNA, 31 bp, Artificial Sequence
  Description of Artificial Sequence:  Enzymatic Nucleic Acid
caggcggcggctagctacaacgagggtcctg

SEQ ID NO: 5133 - DNA, 31 bp, Artificial Sequence
  Description of Artificial Sequence:  Enzymatic Nucleic Acid
gctcaggcggctagctacaacgaggcgggtc

SEQ ID NO: 5134 - DNA, 31 bp, Artificial Sequence
  Description of Artificial Sequence:  Enzymatic Nucleic Acid
agtacagcggctagctacaacgatcaggcgg

SEQ ID NO: 5135 - DNA, 31 bp, Artificial Sequence
  Description of Artificial Sequence:  Enzymatic Nucleic Acid
caaagtacggctagctacaacgaagctcagg

SEQ ID NO: 5136 - DNA, 31 bp, Artificial Sequence
  Description of Artificial Sequence:  Enzymatic Nucleic Acid
gacaaagtggctagctacaacgaacagctca

SEQ ID NO: 5137 - DNA, 31 bp, Artificial Sequence
  Description of Artificial Sequence:  Enzymatic Nucleic Acid
accttgacggctagctacaacgaaaagtaca

SEQ ID NO: 5138 - DNA, 31 bp, Artificial Sequence
  Description of Artificial Sequence:  Enzymatic Nucleic Acid
acatccacggctagctacaacgacttgacaa

SEQ ID NO: 5139 - DNA, 31 bp, Artificial Sequence
  Description of Artificial Sequence:  Enzymatic Nucleic Acid
cgtcacatggctagctacaacgaccaccttg

SEQ ID NO: 5140 - DNA, 31 bp, Artificial Sequence
  Description of Artificial Sequence:  Enzymatic Nucleic Acid
cccgtcacggctagctacaacgaatccacct

SEQ ID NO: 5141 - DNA, 31 bp, Artificial Sequence
  Description of Artificial Sequence:  Enzymatic Nucleic Acid
gcgcccgtggctagctacaacgacacatcca

SEQ ID NO: 5142 - DNA, 31 bp, Artificial Sequence
  Description of Artificial Sequence:  Enzymatic Nucleic Acid
gtacgcgcggctagctacaacgaccgtcaca

SEQ ID NO: 5143 - DNA, 31 bp, Artificial Sequence
  Description of Artificial Sequence:  Enzymatic Nucleic Acid
tcgtacgcggctagctacaacgagcccgtca

SEQ ID NO: 5144 - DNA, 31 bp, Artificial Sequence
  Description of Artificial Sequence:  Enzymatic Nucleic Acid
tgtcgtacggctagctacaacgagcgcccgt

SEQ ID NO: 5145 - DNA, 31 bp, Artificial Sequence
  Description of Artificial Sequence:  Enzymatic Nucleic Acid
ggtgtcgtggctagctacaacgaacgcgccc

SEQ ID NO: 5146 - DNA, 31 bp, Artificial Sequence
  Description of Artificial Sequence:  Enzymatic Nucleic Acid
gatggtgtggctagctacaacgacgtacgcg

SEQ ID NO: 5147 - DNA, 31 bp, Artificial Sequence
  Description of Artificial Sequence:  Enzymatic Nucleic Acid
gggatggtggctagctacaacgagtcgtacg

SEQ ID NO: 5148 - DNA, 31 bp, Artificial Sequence
  Description of Artificial Sequence:  Enzymatic Nucleic Acid
tgggggatggctagctacaacgaggtgtcgt

SEQ ID NO: 5149 - DNA, 31 bp, Artificial Sequence
  Description of Artificial Sequence:  Enzymatic Nucleic Acid
gagcctgtggctagctacaacgacctggggg

SEQ ID NO: 5150 - DNA, 31 bp, Artificial Sequence
  Description of Artificial Sequence:  Enzymatic Nucleic Acid
ccgtgagcggctagctacaacgactgtcctg

SEQ ID NO: 5151 - DNA, 31 bp, Artificial Sequence
  Description of Artificial Sequence:  Enzymatic Nucleic Acid
acctccgtggctagctacaacgagagcctgt

SEQ ID NO: 5152 - DNA, 31 bp, Artificial Sequence
  Description of Artificial Sequence:  Enzymatic Nucleic Acid
gcgatgacggctagctacaacgactccgtga

SEQ ID NO: 5153 - DNA, 31 bp, Artificial Sequence
  Description of Artificial Sequence:  Enzymatic Nucleic Acid
ctggcgatggctagctacaacgagacctccg

SEQ ID NO: 5154 - DNA, 31 bp, Artificial Sequence
  Description of Artificial Sequence:  Enzymatic Nucleic Acid
atgctggcggctagctacaacgagatgacct

SEQ ID NO: 5155 - DNA, 31 bp, Artificial Sequence
  Description of Artificial Sequence:  Enzymatic Nucleic Acid
gatgatgcggctagctacaacgatggcgatg

SEQ ID NO: 5156 - DNA, 31 bp, Artificial Sequence
  Description of Artificial Sequence:  Enzymatic Nucleic Acid
ttgatgatggctagctacaacgagctggcga

SEQ ID NO: 5157 - DNA, 31 bp, Artificial Sequence
  Description of Artificial Sequence:  Enzymatic Nucleic Acid
ggtttgatggctagctacaacgagatgctgg

SEQ ID NO: 5158 - DNA, 31 bp, Artificial Sequence
  Description of Artificial Sequence:  Enzymatic Nucleic Acid
tctggggtggctagctacaacgattgatgat

SEQ ID NO: 5159 - DNA, 31 bp, Artificial Sequence
  Description of Artificial Sequence:  Enzymatic Nucleic Acid
gtacgtgtggctagctacaacgatctggggt

SEQ ID NO: 5160 - DNA, 31 bp, Artificial Sequence
  Description of Artificial Sequence:  Enzymatic Nucleic Acid
cagtacgtggctagctacaacgagttctggg

SEQ ID NO: 5161 - DNA, 31 bp, Artificial Sequence
  Description of Artificial Sequence:  Enzymatic Nucleic Acid
cgcagtacggctagctacaacgagtgttctg

SEQ ID NO: 5162 - DNA, 31 bp, Artificial Sequence
  Description of Artificial Sequence:  Enzymatic Nucleic Acid
cacgcagtggctagctacaacgaacgtgttc

SEQ ID NO: 5163 - DNA, 31 bp, Artificial Sequence
  Description of Artificial Sequence:  Enzymatic Nucleic Acid
acgcacgcggctagctacaacgaagtacgtg

SEQ ID NO: 5164 - DNA, 31 bp, Artificial Sequence
  Description of Artificial Sequence:  Enzymatic Nucleic Acid
cgacgcacggctagctacaacgagcagtacg

SEQ ID NO: 5165 - DNA, 31 bp, Artificial Sequence
  Description of Artificial Sequence:  Enzymatic Nucleic Acid
accgacgcggctagctacaacgaacgcagta

SEQ ID NO: 5166 - DNA, 31 bp, Artificial Sequence
  Description of Artificial Sequence:  Enzymatic Nucleic Acid
ataccgacggctagctacaacgagcacgcag

SEQ ID NO: 5167 - DNA, 31 bp, Artificial Sequence
  Description of Artificial Sequence:  Enzymatic Nucleic Acid
cggcatacggctagctacaacgacgacgcac

SEQ ID NO: 5168 - DNA, 31 bp, Artificial Sequence
  Description of Artificial Sequence:  Enzymatic Nucleic Acid
cacggcatggctagctacaacgaaccgacgc

SEQ ID NO: 5169 - DNA, 31 bp, Artificial Sequence
  Description of Artificial Sequence:  Enzymatic Nucleic Acid
accacggcggctagctacaacgaataccgac

SEQ ID NO: 5170 - DNA, 31 bp, Artificial Sequence
  Description of Artificial Sequence:  Enzymatic Nucleic Acid
tggaccacggctagctacaacgaggcatacc

SEQ ID NO: 5171 - DNA, 31 bp, Artificial Sequence
  Description of Artificial Sequence:  Enzymatic Nucleic Acid
ttctggacggctagctacaacgacacggcat

SEQ ID NO: 5172 - DNA, 31 bp, Artificial Sequence
  Description of Artificial Sequence:  Enzymatic Nucleic Acid
tgggcggcggctagctacaacgacttctgga

SEQ ID NO: 5173 - DNA, 31 bp, Artificial Sequence
  Description of Artificial Sequence:  Enzymatic Nucleic Acid
ccatgggcggctagctacaacgaggccttct

SEQ ID NO: 5174 - DNA, 31 bp, Artificial Sequence
  Description of Artificial Sequence:  Enzymatic Nucleic Acid
gtgcccatggctagctacaacgagggcggcc

SEQ ID NO: 5175 - DNA, 31 bp, Artificial Sequence
  Description of Artificial Sequence:  Enzymatic Nucleic Acid
ggacgtgcggctagctacaacgaccatgggc

SEQ ID NO: 5176 - DNA, 31 bp, Artificial Sequence
  Description of Artificial Sequence:  Enzymatic Nucleic Acid
gcggacgtggctagctacaacgagcccatgg

SEQ ID NO: 5177 - DNA, 31 bp, Artificial Sequence
  Description of Artificial Sequence:  Enzymatic Nucleic Acid
ttgcggacggctagctacaacgagtgcccat

SEQ ID NO: 5178 - DNA, 31 bp, Artificial Sequence
  Description of Artificial Sequence:  Enzymatic Nucleic Acid
ggccttgcggctagctacaacgaggacgtgc

SEQ ID NO: 5179 - DNA, 31 bp, Artificial Sequence
  Description of Artificial Sequence:  Enzymatic Nucleic Acid
ttgaaggcggctagctacaacgacttgcgga

SEQ ID NO: 5180 - DNA, 31 bp, Artificial Sequence
  Description of Artificial Sequence:  Enzymatic Nucleic Acid
gacgtggcggctagctacaacgatcttgaag

SEQ ID NO: 5181 - DNA, 31 bp, Artificial Sequence
  Description of Artificial Sequence:  Enzymatic Nucleic Acid
agagacgtggctagctacaacgaggctcttg

SEQ ID NO: 5182 - DNA, 31 bp, Artificial Sequence
  Description of Artificial Sequence:  Enzymatic Nucleic Acid
gtagagacggctagctacaacgagtggctct

SEQ ID NO: 5183 - DNA, 31 bp, Artificial Sequence
  Description of Artificial Sequence:  Enzymatic Nucleic Acid
gtcaaggtggctagctacaacgaagagacgt

SEQ ID NO: 5184 - DNA, 31 bp, Artificial Sequence
  Description of Artificial Sequence:  Enzymatic Nucleic Acid
aggtctgtggctagctacaacgacaaggtag

SEQ ID NO: 5185 - DNA, 31 bp, Artificial Sequence
  Description of Artificial Sequence:  Enzymatic Nucleic Acid
ctggaggtggctagctacaacgactgtcaag

SEQ ID NO: 5186 - DNA, 31 bp, Artificial Sequence
  Description of Artificial Sequence:  Enzymatic Nucleic Acid
tgtacggcggctagctacaacgatggaggtc

SEQ ID NO: 5187 - DNA, 31 bp, Artificial Sequence
  Description of Artificial Sequence:  Enzymatic Nucleic Acid
gcatgtacggctagctacaacgaggctggag

SEQ ID NO: 5188 - DNA, 31 bp, Artificial Sequence
  Description of Artificial Sequence:  Enzymatic Nucleic Acid
tcgcatgtggctagctacaacgaacggctgg

SEQ ID NO: 5189 - DNA, 31 bp, Artificial Sequence
  Description of Artificial Sequence:  Enzymatic Nucleic Acid
tgtcgcatggctagctacaacgagtacggct

SEQ ID NO: 5190 - DNA, 31 bp, Artificial Sequence
  Description of Artificial Sequence:  Enzymatic Nucleic Acid
actgtcgcggctagctacaacgaatgtacgg

SEQ ID NO: 5191 - DNA, 31 bp, Artificial Sequence
  Description of Artificial Sequence:  Enzymatic Nucleic Acid
cgaactgtggctagctacaacgacgcatgta

SEQ ID NO: 5192 - DNA, 31 bp, Artificial Sequence
  Description of Artificial Sequence:  Enzymatic Nucleic Acid
ccacgaacggctagctacaacgatgtcgcat

SEQ ID NO: 5193 - DNA, 31 bp, Artificial Sequence
  Description of Artificial Sequence:  Enzymatic Nucleic Acid
tgagccacggctagctacaacgagaactgtc

SEQ ID NO: 5194 - DNA, 31 bp, Artificial Sequence
  Description of Artificial Sequence:  Enzymatic Nucleic Acid
aggtgagcggctagctacaacgacacgaact

SEQ ID NO: 5195 - DNA, 31 bp, Artificial Sequence
  Description of Artificial Sequence:  Enzymatic Nucleic Acid
ctgcaggtggctagctacaacgagagccacg

SEQ ID NO: 5196 - DNA, 31 bp, Artificial Sequence
  Description of Artificial Sequence:  Enzymatic Nucleic Acid
tctcctgcggctagctacaacgaaggtgagc

SEQ ID NO: 5197 - DNA, 31 bp, Artificial Sequence
  Description of Artificial Sequence:  Enzymatic Nucleic Acid
gggctggtggctagctacaacgactcctgca

SEQ ID NO: 5198 - DNA, 31 bp, Artificial Sequence
  Description of Artificial Sequence:  Enzymatic Nucleic Acid
cagcgggcggctagctacaacgatggtctcc

SEQ ID NO: 5199 - DNA, 31 bp, Artificial Sequence
  Description of Artificial Sequence:  Enzymatic Nucleic Acid
ccctcagcggctagctacaacgagggctggt

SEQ ID NO: 5200 - DNA, 31 bp, Artificial Sequence
  Description of Artificial Sequence:  Enzymatic Nucleic Acid
gacggcatggctagctacaacgaccctcagc

SEQ ID NO: 5201 - DNA, 31 bp, Artificial Sequence
  Description of Artificial Sequence:  Enzymatic Nucleic Acid
acgacggcggctagctacaacgaatccctca

SEQ ID NO: 5202 - DNA, 31 bp, Artificial Sequence
  Description of Artificial Sequence:  Enzymatic Nucleic Acid
atgacgacggctagctacaacgaggcatccc

SEQ ID NO: 5203 - DNA, 31 bp, Artificial Sequence
  Description of Artificial Sequence:  Enzymatic Nucleic Acid
tcgatgacggctagctacaacgagacggcat

SEQ ID NO: 5204 - DNA, 31 bp, Artificial Sequence
  Description of Artificial Sequence:  Enzymatic Nucleic Acid
tgctcgatggctagctacaacgagacgacgg

SEQ ID NO: 5205 - DNA, 31 bp, Artificial Sequence
  Description of Artificial Sequence:  Enzymatic Nucleic Acid
agctctgcggctagctacaacgatcgatgac

SEQ ID NO: 5206 - DNA, 31 bp, Artificial Sequence
  Description of Artificial Sequence:  Enzymatic Nucleic Acid
ggaggagcggctagctacaacgatctgctcg

SEQ ID NO: 5207 - DNA, 31 bp, Artificial Sequence
  Description of Artificial Sequence:  Enzymatic Nucleic Acid
ggcctcatggctagctacaacgatcagggag

SEQ ID NO: 5208 - DNA, 31 bp, Artificial Sequence
  Description of Artificial Sequence:  Enzymatic Nucleic Acid
ctgctggcggctagctacaacgactcattca

SEQ ID NO: 5209 - DNA, 31 bp, Artificial Sequence
  Description of Artificial Sequence:  Enzymatic Nucleic Acid
gccactgcggctagctacaacgatggcctca

SEQ ID NO: 5210 - DNA, 31 bp, Artificial Sequence
  Description of Artificial Sequence:  Enzymatic Nucleic Acid
gaggccacggctagctacaacgatgctggcc

SEQ ID NO: 5211 - DNA, 31 bp, Artificial Sequence
  Description of Artificial Sequence:  Enzymatic Nucleic Acid
gaagaggcggctagctacaacgacactgctg

SEQ ID NO: 5212 - DNA, 31 bp, Artificial Sequence
  Description of Artificial Sequence:  Enzymatic Nucleic Acid
gaagacgtggctagctacaacgacgaagagg

SEQ ID NO: 5213 - DNA, 31 bp, Artificial Sequence
  Description of Artificial Sequence:  Enzymatic Nucleic Acid
aggaagacggctagctacaacgagtcgaaga

SEQ ID NO: 5214 - DNA, 31 bp, Artificial Sequence
  Description of Artificial Sequence:  Enzymatic Nucleic Acid
tgaagcgtggctagctacaacgaaggaagac

SEQ ID NO: 5215 - DNA, 31 bp, Artificial Sequence
  Description of Artificial Sequence:  Enzymatic Nucleic Acid
catgaagcggctagctacaacgagtaggaag

SEQ ID NO: 5216 - DNA, 31 bp, Artificial Sequence
  Description of Artificial Sequence:  Enzymatic Nucleic Acid
tggcacatggctagctacaacgagaagcgta

SEQ ID NO: 5217 - DNA, 31 bp, Artificial Sequence
  Description of Artificial Sequence:  Enzymatic Nucleic Acid
ggtggcacggctagctacaacgaatgaagcg

SEQ ID NO: 5218 - DNA, 31 bp, Artificial Sequence
  Description of Artificial Sequence:  Enzymatic Nucleic Acid
gtggtggcggctagctacaacgaacatgaag

SEQ ID NO: 5219 - DNA, 31 bp, Artificial Sequence
  Description of Artificial Sequence:  Enzymatic Nucleic Acid
ggcgtggtggctagctacaacgaggcacatg

SEQ ID NO: 5220 - DNA, 31 bp, Artificial Sequence
  Description of Artificial Sequence:  Enzymatic Nucleic Acid
cacggcgtggctagctacaacgaggtggcac

SEQ ID NO: 5221 - DNA, 31 bp, Artificial Sequence
  Description of Artificial Sequence:  Enzymatic Nucleic Acid
cgcacggcggctagctacaacgagtggtggc

SEQ ID NO: 5222 - DNA, 31 bp, Artificial Sequence
  Description of Artificial Sequence:  Enzymatic Nucleic Acid
atgcgcacggctagctacaacgaggcgtggt

SEQ ID NO: 5223 - DNA, 31 bp, Artificial Sequence
  Description of Artificial Sequence:  Enzymatic Nucleic Acid
tgatgcgcggctagctacaacgaacggcgtg

SEQ ID NO: 5224 - DNA, 31 bp, Artificial Sequence
  Description of Artificial Sequence:  Enzymatic Nucleic Acid
cctgatgcggctagctacaacgagcacggcg

SEQ ID NO: 5225 - DNA, 31 bp, Artificial Sequence
  Description of Artificial Sequence:  Enzymatic Nucleic Acid
cccctgatggctagctacaacgagcgcacgg

SEQ ID NO: 5226 - DNA, 31 bp, Artificial Sequence
  Description of Artificial Sequence:  Enzymatic Nucleic Acid
ggacttgcggctagctacaacgaccctgatg

SEQ ID NO: 5227 - DNA, 31 bp, Artificial Sequence
  Description of Artificial Sequence:  Enzymatic Nucleic Acid
cgtaggacggctagctacaacgattgcccct

SEQ ID NO: 5228 - DNA, 31 bp, Artificial Sequence
  Description of Artificial Sequence:  Enzymatic Nucleic Acid
ctggacgtggctagctacaacgaaggacttg

SEQ ID NO: 5229 - DNA, 31 bp, Artificial Sequence
  Description of Artificial Sequence:  Enzymatic Nucleic Acid
cactggacggctagctacaacgagtaggact

SEQ ID NO: 5230 - DNA, 31 bp, Artificial Sequence
  Description of Artificial Sequence:  Enzymatic Nucleic Acid
cctggcacggctagctacaacgatggacgta

SEQ ID NO: 5231 - DNA, 31 bp, Artificial Sequence
  Description of Artificial Sequence:  Enzymatic Nucleic Acid
cccctggcggctagctacaacgaactggacg

SEQ ID NO: 5232 - DNA, 31 bp, Artificial Sequence
  Description of Artificial Sequence:  Enzymatic Nucleic Acid
tgcgggatggctagctacaacgacccctggc

SEQ ID NO: 5233 - DNA, 31 bp, Artificial Sequence
  Description of Artificial Sequence:  Enzymatic Nucleic Acid
agccctgcggctagctacaacgagggatccc

SEQ ID NO: 5234 - DNA, 31 bp, Artificial Sequence
  Description of Artificial Sequence:  Enzymatic Nucleic Acid
gatggagcggctagctacaacgacctgcggg

SEQ ID NO: 5235 - DNA, 31 bp, Artificial Sequence
  Description of Artificial Sequence:  Enzymatic Nucleic Acid
gagaggatggctagctacaacgaggagccct

SEQ ID NO: 5236 - DNA, 31 bp, Artificial Sequence
  Description of Artificial Sequence:  Enzymatic Nucleic Acid
agcagcgtggctagctacaacgaggagagga

SEQ ID NO: 5237 - DNA, 31 bp, Artificial Sequence
  Description of Artificial Sequence:  Enzymatic Nucleic Acid
agagcagcggctagctacaacgagtggagag

SEQ ID NO: 5238 - DNA, 31 bp, Artificial Sequence
  Description of Artificial Sequence:  Enzymatic Nucleic Acid
tgcagagcggctagctacaacgaagcgtgga

SEQ ID NO: 5239 - DNA, 31 bp, Artificial Sequence
  Description of Artificial Sequence:  Enzymatic Nucleic Acid
caggctgcggctagctacaacgaagagcagc

SEQ ID NO: 5240 - DNA, 31 bp, Artificial Sequence
  Description of Artificial Sequence:  Enzymatic Nucleic Acid
gcacaggcggctagctacaacgatgcagagc

SEQ ID NO: 5241 - DNA, 31 bp, Artificial Sequence
  Description of Artificial Sequence:  Enzymatic Nucleic Acid
cgtagcacggctagctacaacgaaggctgca

SEQ ID NO: 5242 - DNA, 31 bp, Artificial Sequence
  Description of Artificial Sequence:  Enzymatic Nucleic Acid
gccgtagcggctagctacaacgaacaggctg

SEQ ID NO: 5243 - DNA, 31 bp, Artificial Sequence
  Description of Artificial Sequence:  Enzymatic Nucleic Acid
gtcgccgtggctagctacaacgaagcacagg

SEQ ID NO: 5244 - DNA, 31 bp, Artificial Sequence
  Description of Artificial Sequence:  Enzymatic Nucleic Acid
catgtcgcggctagctacaacgacgtagcac

SEQ ID NO: 5245 - DNA, 31 bp, Artificial Sequence
  Description of Artificial Sequence:  Enzymatic Nucleic Acid
ctccatgtggctagctacaacgacgccgtag

SEQ ID NO: 5246 - DNA, 31 bp, Artificial Sequence
  Description of Artificial Sequence:  Enzymatic Nucleic Acid
ttctccatggctagctacaacgagtcgccgt

SEQ ID NO: 5247 - DNA, 31 bp, Artificial Sequence
  Description of Artificial Sequence:  Enzymatic Nucleic Acid
cagcttgtggctagctacaacgatctccatg

SEQ ID NO: 5248 - DNA, 31 bp, Artificial Sequence
  Description of Artificial Sequence:  Enzymatic Nucleic Acid
caaacagcggctagctacaacgattgttctc

SEQ ID NO: 5249 - DNA, 31 bp, Artificial Sequence
  Description of Artificial Sequence:  Enzymatic Nucleic Acid
ccgcaaacggctagctacaacgaagcttgtt

SEQ ID NO: 5250 - DNA, 31 bp, Artificial Sequence
  Description of Artificial Sequence:  Enzymatic Nucleic Acid
atccccgcggctagctacaacgaaaacagct

SEQ ID NO: 5251 - DNA, 31 bp, Artificial Sequence
  Description of Artificial Sequence:  Enzymatic Nucleic Acid
cgccgaatggctagctacaacgaccccgcaa

SEQ ID NO: 5252 - DNA, 31 bp, Artificial Sequence
  Description of Artificial Sequence:  Enzymatic Nucleic Acid
cgtcccgcggctagctacaacgacgaatccc

SEQ ID NO: 5253 - DNA, 31 bp, Artificial Sequence
  Description of Artificial Sequence:  Enzymatic Nucleic Acid
cagcccgtggctagctacaacgacccgccga

SEQ ID NO: 5254 - DNA, 31 bp, Artificial Sequence
  Description of Artificial Sequence:  Enzymatic Nucleic Acid
ggagcagcggctagctacaacgaccgtcccg

SEQ ID NO: 5255 - DNA, 31 bp, Artificial Sequence
  Description of Artificial Sequence:  Enzymatic Nucleic Acid
gcaggagcggctagctacaacgaagcccgtc

SEQ ID NO: 5256 - DNA, 31 bp, Artificial Sequence
  Description of Artificial Sequence:  Enzymatic Nucleic Acid
ccaaacgcggctagctacaacgaaggagcag

SEQ ID NO: 5257 - DNA, 31 bp, Artificial Sequence
  Description of Artificial Sequence:  Enzymatic Nucleic Acid
caccaaacggctagctacaacgagcaggagc

SEQ ID NO: 5258 - DNA, 31 bp, Artificial Sequence
  Description of Artificial Sequence:  Enzymatic Nucleic Acid
tcatccacggctagctacaacgacaaacgca

SEQ ID NO: 5259 - DNA, 31 bp, Artificial Sequence
  Description of Artificial Sequence:  Enzymatic Nucleic Acid
gaaatcatggctagctacaacgaccaccaaa

SEQ ID NO: 5260 - DNA, 31 bp, Artificial Sequence
  Description of Artificial Sequence:  Enzymatic Nucleic Acid
caagaaatggctagctacaacgacatccacc

SEQ ID NO: 5261 - DNA, 31 bp, Artificial Sequence
  Description of Artificial Sequence:  Enzymatic Nucleic Acid
tcaccaacggctagctacaacgaaagaaatc

SEQ ID NO: 5262 - DNA, 31 bp, Artificial Sequence
  Description of Artificial Sequence:  Enzymatic Nucleic Acid
ggtgtcacggctagctacaacgacaacaaga

SEQ ID NO: 5263 - DNA, 31 bp, Artificial Sequence
  Description of Artificial Sequence:  Enzymatic Nucleic Acid
tgaggtgtggctagctacaacgacaccaaca

SEQ ID NO: 5264 - DNA, 31 bp, Artificial Sequence
  Description of Artificial Sequence:  Enzymatic Nucleic Acid
ggtgaggtggctagctacaacgagtcaccaa

SEQ ID NO: 5265 - DNA, 31 bp, Artificial Sequence
  Description of Artificial Sequence:  Enzymatic Nucleic Acid
ggtgaggtggctagctacaacgagaggtgtc

SEQ ID NO: 5266 - DNA, 31 bp, Artificial Sequence
  Description of Artificial Sequence:  Enzymatic Nucleic Acid
gcgtgggtggctagctacaacgagaggtgag

SEQ ID NO: 5267 - DNA, 31 bp, Artificial Sequence
  Description of Artificial Sequence:  Enzymatic Nucleic Acid
tttcgcgtggctagctacaacgagggtgagg

SEQ ID NO: 5268 - DNA, 31 bp, Artificial Sequence
  Description of Artificial Sequence:  Enzymatic Nucleic Acid
gttttcgcggctagctacaacgagtgggtga

SEQ ID NO: 5269 - DNA, 31 bp, Artificial Sequence
  Description of Artificial Sequence:  Enzymatic Nucleic Acid
aggaaggtggctagctacaacgatttcgcgt

SEQ ID NO: 5270 - DNA, 31 bp, Artificial Sequence
  Description of Artificial Sequence:  Enzymatic Nucleic Acid
accagggtggctagctacaacgacctgagga

SEQ ID NO: 5271 - DNA, 31 bp, Artificial Sequence
  Description of Artificial Sequence:  Enzymatic Nucleic Acid
cctcggacggctagctacaacgacagggtcc

SEQ ID NO: 5272 - DNA, 31 bp, Artificial Sequence
  Description of Artificial Sequence:  Enzymatic Nucleic Acid
agggacacggctagctacaacgactcggacc

SEQ ID NO: 5273 - DNA, 31 bp, Artificial Sequence
  Description of Artificial Sequence:  Enzymatic Nucleic Acid
tcagggacggctagctacaacgaacctcgga

SEQ ID NO: 5274 - DNA, 31 bp, Artificial Sequence
  Description of Artificial Sequence:  Enzymatic Nucleic Acid
agccatacggctagctacaacgatcagggac

SEQ ID NO: 5275 - DNA, 31 bp, Artificial Sequence
  Description of Artificial Sequence:  Enzymatic Nucleic Acid
gcagccatggctagctacaacgaactcaggg

SEQ ID NO: 5276 - DNA, 31 bp, Artificial Sequence
  Description of Artificial Sequence:  Enzymatic Nucleic Acid
cacgcagcggctagctacaacgacatactca

SEQ ID NO: 5277 - DNA, 31 bp, Artificial Sequence
  Description of Artificial Sequence:  Enzymatic Nucleic Acid
caccacgcggctagctacaacgaagccatac

SEQ ID NO: 5278 - DNA, 31 bp, Artificial Sequence
  Description of Artificial Sequence:  Enzymatic Nucleic Acid
ttcaccacggctagctacaacgagcagccat

SEQ ID NO: 5279 - DNA, 31 bp, Artificial Sequence
  Description of Artificial Sequence:  Enzymatic Nucleic Acid
aagttcacggctagctacaacgacacgcagc

SEQ ID NO: 5280 - DNA, 31 bp, Artificial Sequence
  Description of Artificial Sequence:  Enzymatic Nucleic Acid
ccgcaagtggctagctacaacgatcaccacg

SEQ ID NO: 5281 - DNA, 31 bp, Artificial Sequence
  Description of Artificial Sequence:  Enzymatic Nucleic Acid
tcttccgcggctagctacaacgaaagttcac

SEQ ID NO: 5282 - DNA, 31 bp, Artificial Sequence
  Description of Artificial Sequence:  Enzymatic Nucleic Acid
accactgtggctagctacaacgacttccgca

SEQ ID NO: 5283 - DNA, 31 bp, Artificial Sequence
  Description of Artificial Sequence:  Enzymatic Nucleic Acid
ttcaccacggctagctacaacgatgtcttcc

SEQ ID NO: 5284 - DNA, 31 bp, Artificial Sequence
  Description of Artificial Sequence:  Enzymatic Nucleic Acid
aagttcacggctagctacaacgacactgtct

SEQ ID NO: 5285 - DNA, 31 bp, Artificial Sequence
  Description of Artificial Sequence:  Enzymatic Nucleic Acid
agggaagtggctagctacaacgatcaccact

SEQ ID NO: 5286 - DNA, 31 bp, Artificial Sequence
  Description of Artificial Sequence:  Enzymatic Nucleic Acid
tcttctacggctagctacaacgaagggaagt

SEQ ID NO: 5287 - DNA, 31 bp, Artificial Sequence
  Description of Artificial Sequence:  Enzymatic Nucleic Acid
ggcctcgtggctagctacaacgacttctaca

SEQ ID NO: 5288 - DNA, 31 bp, Artificial Sequence
  Description of Artificial Sequence:  Enzymatic Nucleic Acid
cccagggcggctagctacaacgactcgtctt

SEQ ID NO: 5289 - DNA, 31 bp, Artificial Sequence
  Description of Artificial Sequence:  Enzymatic Nucleic Acid
cgtgccacggctagctacaacgaccagggcc

SEQ ID NO: 5290 - DNA, 31 bp, Artificial Sequence
  Description of Artificial Sequence:  Enzymatic Nucleic Acid
agccgtgcggctagctacaacgacacccagg

SEQ ID NO: 5291 - DNA, 31 bp, Artificial Sequence
  Description of Artificial Sequence:  Enzymatic Nucleic Acid
aaagccgtggctagctacaacgagccaccca

SEQ ID NO: 5292 - DNA, 31 bp, Artificial Sequence
  Description of Artificial Sequence:  Enzymatic Nucleic Acid
acaaaagcggctagctacaacgacgtgccac

SEQ ID NO: 5293 - DNA, 31 bp, Artificial Sequence
  Description of Artificial Sequence:  Enzymatic Nucleic Acid
atctgaacggctagctacaacgaaaaagccg

SEQ ID NO: 5294 - DNA, 31 bp, Artificial Sequence
  Description of Artificial Sequence:  Enzymatic Nucleic Acid
gccggcatggctagctacaacgactgaacaa

SEQ ID NO: 5295 - DNA, 31 bp, Artificial Sequence
  Description of Artificial Sequence:  Enzymatic Nucleic Acid
gggccggcggctagctacaacgaatctgaac

SEQ ID NO: 5296 - DNA, 31 bp, Artificial Sequence
  Description of Artificial Sequence:  Enzymatic Nucleic Acid
ccgtgggcggctagctacaacgacggcatct

SEQ ID NO: 5297 - DNA, 31 bp, Artificial Sequence
  Description of Artificial Sequence:  Enzymatic Nucleic Acid
taggccgtggctagctacaacgagggccggc

SEQ ID NO: 5298 - DNA, 31 bp, Artificial Sequence
  Description of Artificial Sequence:  Enzymatic Nucleic Acid
gaataggcggctagctacaacgacgtgggcc

SEQ ID NO: 5299 - DNA, 31 bp, Artificial Sequence
  Description of Artificial Sequence:  Enzymatic Nucleic Acid
aggggaatggctagctacaacgaaggccgtg

SEQ ID NO: 5300 - DNA, 31 bp, Artificial Sequence
  Description of Artificial Sequence:  Enzymatic Nucleic Acid
ggccgcacggctagctacaacgacaggggaa

SEQ ID NO: 5301 - DNA, 31 bp, Artificial Sequence
  Description of Artificial Sequence:  Enzymatic Nucleic Acid
caggccgcggctagctacaacgaaccagggg

SEQ ID NO: 5302 - DNA, 31 bp, Artificial Sequence
  Description of Artificial Sequence:  Enzymatic Nucleic Acid
cagcaggcggctagctacaacgacgcaccag

SEQ ID NO: 5303 - DNA, 31 bp, Artificial Sequence
  Description of Artificial Sequence:  Enzymatic Nucleic Acid
ccagcagcggctagctacaacgaaggccgca

SEQ ID NO: 5304 - DNA, 31 bp, Artificial Sequence
  Description of Artificial Sequence:  Enzymatic Nucleic Acid
tatccagcggctagctacaacgaagcaggcc

SEQ ID NO: 5305 - DNA, 31 bp, Artificial Sequence
  Description of Artificial Sequence:  Enzymatic Nucleic Acid
ccgggtatggctagctacaacgaccagcagc

SEQ ID NO: 5306 - DNA, 31 bp, Artificial Sequence
  Description of Artificial Sequence:  Enzymatic Nucleic Acid
gtccgggtggctagctacaacgaatccagca

SEQ ID NO: 5307 - DNA, 31 bp, Artificial Sequence
  Description of Artificial Sequence:  Enzymatic Nucleic Acid
tccagggtggctagctacaacgaccgggtat

SEQ ID NO: 5308 - DNA, 31 bp, Artificial Sequence
  Description of Artificial Sequence:  Enzymatic Nucleic Acid
ctctgcacggctagctacaacgactccaggg

SEQ ID NO: 5309 - DNA, 31 bp, Artificial Sequence
  Description of Artificial Sequence:  Enzymatic Nucleic Acid
cgctctgcggctagctacaacgaacctccag

SEQ ID NO: 5310 - DNA, 31 bp, Artificial Sequence
  Description of Artificial Sequence:  Enzymatic Nucleic Acid
gtagtcgcggctagctacaacgatctgcacc

SEQ ID NO: 5311 - DNA, 31 bp, Artificial Sequence
  Description of Artificial Sequence:  Enzymatic Nucleic Acid
ggagtagtggctagctacaacgacgctctgc

SEQ ID NO: 5312 - DNA, 31 bp, Artificial Sequence
  Description of Artificial Sequence:  Enzymatic Nucleic Acid
gctggagtggctagctacaacgaagtcgctc

SEQ ID NO: 5313 - DNA, 31 bp, Artificial Sequence
  Description of Artificial Sequence:  Enzymatic Nucleic Acid
ggcatagcggctagctacaacgatggagtag

SEQ ID NO: 5314 - DNA, 31 bp, Artificial Sequence
  Description of Artificial Sequence:  Enzymatic Nucleic Acid
ccgggcatggctagctacaacgaagctggag

SEQ ID NO: 5315 - DNA, 31 bp, Artificial Sequence
  Description of Artificial Sequence:  Enzymatic Nucleic Acid
gtccgggcggctagctacaacgaatagctgg

SEQ ID NO: 5316 - DNA, 31 bp, Artificial Sequence
  Description of Artificial Sequence:  Enzymatic Nucleic Acid
atggaggtggctagctacaacgaccgggcat

SEQ ID NO: 5317 - DNA, 31 bp, Artificial Sequence
  Description of Artificial Sequence:  Enzymatic Nucleic Acid
gctctgatggctagctacaacgaggaggtcc

SEQ ID NO: 5318 - DNA, 31 bp, Artificial Sequence
  Description of Artificial Sequence:  Enzymatic Nucleic Acid
agactggcggctagctacaacgatctgatgg

SEQ ID NO: 5319 - DNA, 31 bp, Artificial Sequence
  Description of Artificial Sequence:  Enzymatic Nucleic Acid
ggtgagacggctagctacaacgatggctctg

SEQ ID NO: 5320 - DNA, 31 bp, Artificial Sequence
  Description of Artificial Sequence:  Enzymatic Nucleic Acid
ttgaaggtggctagctacaacgagagactgg

SEQ ID NO: 5321 - DNA, 31 bp, Artificial Sequence
  Description of Artificial Sequence:  Enzymatic Nucleic Acid
gccgcggtggctagctacaacgatgaaggtg

SEQ ID NO: 5322 - DNA, 31 bp, Artificial Sequence
  Description of Artificial Sequence:  Enzymatic Nucleic Acid
gaagccgcggctagctacaacgaggttgaag

SEQ ID NO: 5323 - DNA, 31 bp, Artificial Sequence
  Description of Artificial Sequence:  Enzymatic Nucleic Acid
cttgaagcggctagctacaacgacgcggttg

SEQ ID NO: 5324 - DNA, 31 bp, Artificial Sequence
  Description of Artificial Sequence:  Enzymatic Nucleic Acid
ctcccagcggctagctacaacgacttgaagc

SEQ ID NO: 5325 - DNA, 31 bp, Artificial Sequence
  Description of Artificial Sequence:  Enzymatic Nucleic Acid
acgcatgtggctagctacaacgatcctccca

SEQ ID NO: 5326 - DNA, 31 bp, Artificial Sequence
  Description of Artificial Sequence:  Enzymatic Nucleic Acid
cgacgcatggctagctacaacgagttcctcc

SEQ ID NO: 5327 - DNA, 31 bp, Artificial Sequence
  Description of Artificial Sequence:  Enzymatic Nucleic Acid
tgcgacgcggctagctacaacgaatgttcct

SEQ ID NO: 5328 - DNA, 31 bp, Artificial Sequence
  Description of Artificial Sequence:  Enzymatic Nucleic Acid
tttgcgacggctagctacaacgagcatgttc

SEQ ID NO: 5329 - DNA, 31 bp, Artificial Sequence
  Description of Artificial Sequence:  Enzymatic Nucleic Acid
gagtttgcggctagctacaacgagacgcatg

SEQ ID NO: 5330 - DNA, 31 bp, Artificial Sequence
  Description of Artificial Sequence:  Enzymatic Nucleic Acid
caaagagtggctagctacaacgattgcgacg

SEQ ID NO: 5331 - DNA, 31 bp, Artificial Sequence
  Description of Artificial Sequence:  Enzymatic Nucleic Acid
cgcaagacggctagctacaacgacccaaaga

SEQ ID NO: 5332 - DNA, 31 bp, Artificial Sequence
  Description of Artificial Sequence:  Enzymatic Nucleic Acid
tcagccgcggctagctacaacgaaagacccc

SEQ ID NO: 5333 - DNA, 31 bp, Artificial Sequence
  Description of Artificial Sequence:  Enzymatic Nucleic Acid
acttcagcggctagctacaacgacgcaagac

SEQ ID NO: 5334 - DNA, 31 bp, Artificial Sequence
  Description of Artificial Sequence:  Enzymatic Nucleic Acid
tgtgacacggctagctacaacgattcagccg

SEQ ID NO: 5335 - DNA, 31 bp, Artificial Sequence
  Description of Artificial Sequence:  Enzymatic Nucleic Acid
gctgtgacggctagctacaacgaacttcagc

SEQ ID NO: 5336 - DNA, 31 bp, Artificial Sequence
  Description of Artificial Sequence:  Enzymatic Nucleic Acid
caggctgtggctagctacaacgagacacttc

SEQ ID NO: 5337 - DNA, 31 bp, Artificial Sequence
  Description of Artificial Sequence:  Enzymatic Nucleic Acid
aaacaggcggctagctacaacgatgtgacac

SEQ ID NO: 5338 - DNA, 31 bp, Artificial Sequence
  Description of Artificial Sequence:  Enzymatic Nucleic Acid
ccagaaacggctagctacaacgaaggctgtg

SEQ ID NO: 5339 - DNA, 31 bp, Artificial Sequence
  Description of Artificial Sequence:  Enzymatic Nucleic Acid
ctgcaaatggctagctacaacgaccagaaac

SEQ ID NO: 5340 - DNA, 31 bp, Artificial Sequence
  Description of Artificial Sequence:  Enzymatic Nucleic Acid
tcacctgcggctagctacaacgaaaatccag

SEQ ID NO: 5341 - DNA, 31 bp, Artificial Sequence
  Description of Artificial Sequence:  Enzymatic Nucleic Acid
ctgttcacggctagctacaacgactgcaaat

SEQ ID NO: 5342 - DNA, 31 bp, Artificial Sequence
  Description of Artificial Sequence:  Enzymatic Nucleic Acid
gaggctgtggctagctacaacgatcacctgc

SEQ ID NO: 5343 - DNA, 31 bp, Artificial Sequence
  Description of Artificial Sequence:  Enzymatic Nucleic Acid
ctggaggcggctagctacaacgatgttcacc

SEQ ID NO: 5344 - DNA, 31 bp, Artificial Sequence
  Description of Artificial Sequence:  Enzymatic Nucleic Acid
cacaccgtggctagctacaacgactggaggc

SEQ ID NO: 5345 - DNA, 31 bp, Artificial Sequence
  Description of Artificial Sequence:  Enzymatic Nucleic Acid
gtgcacacggctagctacaacgacgtctgga

SEQ ID NO: 5346 - DNA, 31 bp, Artificial Sequence
  Description of Artificial Sequence:  Enzymatic Nucleic Acid
tggtgcacggctagctacaacgaaccgtctg

SEQ ID NO: 5347 - DNA, 31 bp, Artificial Sequence
  Description of Artificial Sequence:  Enzymatic Nucleic Acid
gttggtgcggctagctacaacgaacaccgtc

SEQ ID NO: 5348 - DNA, 31 bp, Artificial Sequence
  Description of Artificial Sequence:  Enzymatic Nucleic Acid
atgttggtggctagctacaacgagcacaccg

SEQ ID NO: 5349 - DNA, 31 bp, Artificial Sequence
  Description of Artificial Sequence:  Enzymatic Nucleic Acid
gtagatgtggctagctacaacgatggtgcac

SEQ ID NO: 5350 - DNA, 31 bp, Artificial Sequence
  Description of Artificial Sequence:  Enzymatic Nucleic Acid
ttgtagatggctagctacaacgagttggtgc

SEQ ID NO: 5351 - DNA, 31 bp, Artificial Sequence
  Description of Artificial Sequence:  Enzymatic Nucleic Acid
gatcttgtggctagctacaacgaagatgttg

SEQ ID NO: 5352 - DNA, 31 bp, Artificial Sequence
  Description of Artificial Sequence:  Enzymatic Nucleic Acid
aggaggatggctagctacaacgacttgtaga

SEQ ID NO: 5353 - DNA, 31 bp, Artificial Sequence
  Description of Artificial Sequence:  Enzymatic Nucleic Acid
cctgcagcggctagctacaacgaaggaggat

SEQ ID NO: 5354 - DNA, 31 bp, Artificial Sequence
  Description of Artificial Sequence:  Enzymatic Nucleic Acid
acgcctgcggctagctacaacgaagcaggag

SEQ ID NO: 5355 - DNA, 31 bp, Artificial Sequence
  Description of Artificial Sequence:  Enzymatic Nucleic Acid
ctgtacgcggctagctacaacgactgcagca

SEQ ID NO: 5356 - DNA, 31 bp, Artificial Sequence
  Description of Artificial Sequence:  Enzymatic Nucleic Acid
acctgtacggctagctacaacgagcctgcag

SEQ ID NO: 5357 - DNA, 31 bp, Artificial Sequence
  Description of Artificial Sequence:  Enzymatic Nucleic Acid
aaacctgtggctagctacaacgaacgcctgc

SEQ ID NO: 5358 - DNA, 31 bp, Artificial Sequence
  Description of Artificial Sequence:  Enzymatic Nucleic Acid
cgtgaaacggctagctacaacgactgtacgc

SEQ ID NO: 5359 - DNA, 31 bp, Artificial Sequence
  Description of Artificial Sequence:  Enzymatic Nucleic Acid
acatgcgtggctagctacaacgagaaacctg

SEQ ID NO: 5360 - DNA, 31 bp, Artificial Sequence
  Description of Artificial Sequence:  Enzymatic Nucleic Acid
acacatgcggctagctacaacgagtgaaacc

SEQ ID NO: 5361 - DNA, 31 bp, Artificial Sequence
  Description of Artificial Sequence:  Enzymatic Nucleic Acid
gcacacatggctagctacaacgagcgtgaaa

SEQ ID NO: 5362 - DNA, 31 bp, Artificial Sequence
  Description of Artificial Sequence:  Enzymatic Nucleic Acid
cagcacacggctagctacaacgaatgcgtga

SEQ ID NO: 5363 - DNA, 31 bp, Artificial Sequence
  Description of Artificial Sequence:  Enzymatic Nucleic Acid
tgcagcacggctagctacaacgaacatgcgt

SEQ ID NO: 5364 - DNA, 31 bp, Artificial Sequence
  Description of Artificial Sequence:  Enzymatic Nucleic Acid
gctgcagcggctagctacaacgaacacatgc

SEQ ID NO: 5365 - DNA, 31 bp, Artificial Sequence
  Description of Artificial Sequence:  Enzymatic Nucleic Acid
ggagctgcggctagctacaacgaagcacaca

SEQ ID NO: 5366 - DNA, 31 bp, Artificial Sequence
  Description of Artificial Sequence:  Enzymatic Nucleic Acid
atgggagcggctagctacaacgatgcagcac

SEQ ID NO: 5367 - DNA, 31 bp, Artificial Sequence
  Description of Artificial Sequence:  Enzymatic Nucleic Acid
gatgaaatggctagctacaacgagggagctg

SEQ ID NO: 5368 - DNA, 31 bp, Artificial Sequence
  Description of Artificial Sequence:  Enzymatic Nucleic Acid
ttgctgatggctagctacaacgagaaatggg

SEQ ID NO: 5369 - DNA, 31 bp, Artificial Sequence
  Description of Artificial Sequence:  Enzymatic Nucleic Acid
aaacttgcggctagctacaacgatgatgaaa

SEQ ID NO: 5370 - DNA, 31 bp, Artificial Sequence
  Description of Artificial Sequence:  Enzymatic Nucleic Acid
ttccaaacggctagctacaacgattgctgat

SEQ ID NO: 5371 - DNA, 31 bp, Artificial Sequence
  Description of Artificial Sequence:  Enzymatic Nucleic Acid
tgtggggtggctagctacaacgatcttccaa

SEQ ID NO: 5372 - DNA, 31 bp, Artificial Sequence
  Description of Artificial Sequence:  Enzymatic Nucleic Acid
aaaaatgtggctagctacaacgaggggttct

SEQ ID NO: 5373 - DNA, 31 bp, Artificial Sequence
  Description of Artificial Sequence:  Enzymatic Nucleic Acid
ggaaaaatggctagctacaacgagtggggtt

SEQ ID NO: 5374 - DNA, 31 bp, Artificial Sequence
  Description of Artificial Sequence:  Enzymatic Nucleic Acid
tgacgcgcggctagctacaacgaaggaaaaa

SEQ ID NO: 5375 - DNA, 31 bp, Artificial Sequence
  Description of Artificial Sequence:  Enzymatic Nucleic Acid
gatgacgcggctagctacaacgagcaggaaa

SEQ ID NO: 5376 - DNA, 31 bp, Artificial Sequence
  Description of Artificial Sequence:  Enzymatic Nucleic Acid
gagatgacggctagctacaacgagcgcagga

SEQ ID NO: 5377 - DNA, 31 bp, Artificial Sequence
  Description of Artificial Sequence:  Enzymatic Nucleic Acid
tcagagatggctagctacaacgagacgcgca

SEQ ID NO: 5378 - DNA, 31 bp, Artificial Sequence
  Description of Artificial Sequence:  Enzymatic Nucleic Acid
ggccgtgtggctagctacaacgacagagatg

SEQ ID NO: 5379 - DNA, 31 bp, Artificial Sequence
  Description of Artificial Sequence:  Enzymatic Nucleic Acid
gaggccgtggctagctacaacgagtcagaga

SEQ ID NO: 5380 - DNA, 31 bp, Artificial Sequence
  Description of Artificial Sequence:  Enzymatic Nucleic Acid
agggaggcggctagctacaacgacgtgtcag

SEQ ID NO: 5381 - DNA, 31 bp, Artificial Sequence
  Description of Artificial Sequence:  Enzymatic Nucleic Acid
ggagtagcggctagctacaacgaagagggag

SEQ ID NO: 5382 - DNA, 31 bp, Artificial Sequence
  Description of Artificial Sequence:  Enzymatic Nucleic Acid
gatggagtggctagctacaacgaagcagagg

SEQ ID NO: 5383 - DNA, 31 bp, Artificial Sequence
  Description of Artificial Sequence:  Enzymatic Nucleic Acid
ttcaggatggctagctacaacgaggagtagc

SEQ ID NO: 5384 - DNA, 31 bp, Artificial Sequence
  Description of Artificial Sequence:  Enzymatic Nucleic Acid
ttcttggcggctagctacaacgatttcagga

SEQ ID NO: 5385 - DNA, 31 bp, Artificial Sequence
  Description of Artificial Sequence:  Enzymatic Nucleic Acid
ccctgcgtggctagctacaacgatcttggct

SEQ ID NO: 5386 - DNA, 31 bp, Artificial Sequence
  Description of Artificial Sequence:  Enzymatic Nucleic Acid
atccctgcggctagctacaacgagttcttgg

SEQ ID NO: 5387 - DNA, 31 bp, Artificial Sequence
  Description of Artificial Sequence:  Enzymatic Nucleic Acid
agcgacatggctagctacaacgaccctgcgt

SEQ ID NO: 5388 - DNA, 31 bp, Artificial Sequence
  Description of Artificial Sequence:  Enzymatic Nucleic Acid
ccagcgacggctagctacaacgaatccctgc

SEQ ID NO: 5389 - DNA, 31 bp, Artificial Sequence
  Description of Artificial Sequence:  Enzymatic Nucleic Acid
cccccagcggctagctacaacgagacatccc

SEQ ID NO: 5390 - DNA, 31 bp, Artificial Sequence
  Description of Artificial Sequence:  Enzymatic Nucleic Acid
cccttggcggctagctacaacgaccccagcg

SEQ ID NO: 5391 - DNA, 31 bp, Artificial Sequence
  Description of Artificial Sequence:  Enzymatic Nucleic Acid
ggcggcgcggctagctacaacgaccttggcc

SEQ ID NO: 5392 - DNA, 31 bp, Artificial Sequence
  Description of Artificial Sequence:  Enzymatic Nucleic Acid
ccggcggcggctagctacaacgagcccttgg

SEQ ID NO: 5393 - DNA, 31 bp, Artificial Sequence
  Description of Artificial Sequence:  Enzymatic Nucleic Acid
gggccggcggctagctacaacgaggcgccct

SEQ ID NO: 5394 - DNA, 31 bp, Artificial Sequence
  Description of Artificial Sequence:  Enzymatic Nucleic Acid
cagagggcggctagctacaacgacggcggcg

SEQ ID NO: 5395 - DNA, 31 bp, Artificial Sequence
  Description of Artificial Sequence:  Enzymatic Nucleic Acid
cggagggcggctagctacaacgaagagggcc

SEQ ID NO: 5396 - DNA, 31 bp, Artificial Sequence
  Description of Artificial Sequence:  Enzymatic Nucleic Acid
tgcacggcggctagctacaacgactcggagg

SEQ ID NO: 5397 - DNA, 31 bp, Artificial Sequence
  Description of Artificial Sequence:  Enzymatic Nucleic Acid
cactgcacggctagctacaacgaggcctcgg

SEQ ID NO: 5398 - DNA, 31 bp, Artificial Sequence
  Description of Artificial Sequence:  Enzymatic Nucleic Acid
gccactgcggctagctacaacgaacggcctc

SEQ ID NO: 5399 - DNA, 31 bp, Artificial Sequence
  Description of Artificial Sequence:  Enzymatic Nucleic Acid
acagccacggctagctacaacgatgcacggc

SEQ ID NO: 5400 - DNA, 31 bp, Artificial Sequence
  Description of Artificial Sequence:  Enzymatic Nucleic Acid
ggcacagcggctagctacaacgacactgcac

SEQ ID NO: 5401 - DNA, 31 bp, Artificial Sequence
  Description of Artificial Sequence:  Enzymatic Nucleic Acid
ggtggcacggctagctacaacgaagccactg

SEQ ID NO: 5402 - DNA, 31 bp, Artificial Sequence
  Description of Artificial Sequence:  Enzymatic Nucleic Acid
ttggtggcggctagctacaacgaacagccac

SEQ ID NO: 5403 - DNA, 31 bp, Artificial Sequence
  Description of Artificial Sequence:  Enzymatic Nucleic Acid
tgcttggtggctagctacaacgaggcacagc

SEQ ID NO: 5404 - DNA, 31 bp, Artificial Sequence
  Description of Artificial Sequence:  Enzymatic Nucleic Acid
aggaatgcggctagctacaacgattggtggc

SEQ ID NO: 5405 - DNA, 31 bp, Artificial Sequence
  Description of Artificial Sequence:  Enzymatic Nucleic Acid
gcaggaatggctagctacaacgagcttggtg

SEQ ID NO: 5406 - DNA, 31 bp, Artificial Sequence
  Description of Artificial Sequence:  Enzymatic Nucleic Acid
gcttgagcggctagctacaacgaaggaatgc

SEQ ID NO: 5407 - DNA, 31 bp, Artificial Sequence
  Description of Artificial Sequence:  Enzymatic Nucleic Acid
gagtcagcggctagctacaacgattgagcag

SEQ ID NO: 5408 - DNA, 31 bp, Artificial Sequence
  Description of Artificial Sequence:  Enzymatic Nucleic Acid
tgtcgagtggctagctacaacgacagcttga

SEQ ID NO: 5409 - DNA, 31 bp, Artificial Sequence
  Description of Artificial Sequence:  Enzymatic Nucleic Acid
cacggtgtggctagctacaacgacgagtcag

SEQ ID NO: 5410 - DNA, 31 bp, Artificial Sequence
  Description of Artificial Sequence:  Enzymatic Nucleic Acid
gacacggtggctagctacaacgagtcgagtc

SEQ ID NO: 5411 - DNA, 31 bp, Artificial Sequence
  Description of Artificial Sequence:  Enzymatic Nucleic Acid
ggtgacacggctagctacaacgaggtgtcga

SEQ ID NO: 5412 - DNA, 31 bp, Artificial Sequence
  Description of Artificial Sequence:  Enzymatic Nucleic Acid
taggtgacggctagctacaacgaacggtgtc

SEQ ID NO: 5413 - DNA, 31 bp, Artificial Sequence
  Description of Artificial Sequence:  Enzymatic Nucleic Acid
acgtaggtggctagctacaacgagacacggt

SEQ ID NO: 5414 - DNA, 31 bp, Artificial Sequence
  Description of Artificial Sequence:  Enzymatic Nucleic Acid
tggcacgtggctagctacaacgaaggtgaca

SEQ ID NO: 5415 - DNA, 31 bp, Artificial Sequence
  Description of Artificial Sequence:  Enzymatic Nucleic Acid
agtggcacggctagctacaacgagtaggtga

SEQ ID NO: 5416 - DNA, 31 bp, Artificial Sequence
  Description of Artificial Sequence:  Enzymatic Nucleic Acid
ggagtggcggctagctacaacgaacgtaggt

SEQ ID NO: 5417 - DNA, 31 bp, Artificial Sequence
  Description of Artificial Sequence:  Enzymatic Nucleic Acid
ccaggagtggctagctacaacgaggcacgta

SEQ ID NO: 5418 - DNA, 31 bp, Artificial Sequence
  Description of Artificial Sequence:  Enzymatic Nucleic Acid
tgagtgacggctagctacaacgacccaggag

SEQ ID NO: 5419 - DNA, 31 bp, Artificial Sequence
  Description of Artificial Sequence:  Enzymatic Nucleic Acid
tcctgagtggctagctacaacgagaccccag

SEQ ID NO: 5420 - DNA, 31 bp, Artificial Sequence
  Description of Artificial Sequence:  Enzymatic Nucleic Acid
tgggctgtggctagctacaacgacctgagtg

SEQ ID NO: 5421 - DNA, 31 bp, Artificial Sequence
  Description of Artificial Sequence:  Enzymatic Nucleic Acid
gtctgggcggctagctacaacgatgtcctga

SEQ ID NO: 5422 - DNA, 31 bp, Artificial Sequence
  Description of Artificial Sequence:  Enzymatic Nucleic Acid
agctgcgtggctagctacaacgactgggctg

SEQ ID NO: 5423 - DNA, 31 bp, Artificial Sequence
  Description of Artificial Sequence:  Enzymatic Nucleic Acid
tcagctgcggctagctacaacgagtctgggc

SEQ ID NO: 5424 - DNA, 31 bp, Artificial Sequence
  Description of Artificial Sequence:  Enzymatic Nucleic Acid
gactcagcggctagctacaacgatgcgtctg

SEQ ID NO: 5425 - DNA, 31 bp, Artificial Sequence
  Description of Artificial Sequence:  Enzymatic Nucleic Acid
cttccgacggctagctacaacgatcagctgc

SEQ ID NO: 5426 - DNA, 31 bp, Artificial Sequence
  Description of Artificial Sequence:  Enzymatic Nucleic Acid
ccgggagcggctagctacaacgattccgact

SEQ ID NO: 5427 - DNA, 31 bp, Artificial Sequence
  Description of Artificial Sequence:  Enzymatic Nucleic Acid
agcgtcgtggctagctacaacgaccccggga

SEQ ID NO: 5428 - DNA, 31 bp, Artificial Sequence
  Description of Artificial Sequence:  Enzymatic Nucleic Acid
gtcagcgtggctagctacaacgacgtccccg

SEQ ID NO: 5429 - DNA, 31 bp, Artificial Sequence
  Description of Artificial Sequence:  Enzymatic Nucleic Acid
cagtcagcggctagctacaacgagtcgtccc

SEQ ID NO: 5430 - DNA, 31 bp, Artificial Sequence
  Description of Artificial Sequence:  Enzymatic Nucleic Acid
agggcagtggctagctacaacgacagcgtcg

SEQ ID NO: 5431 - DNA, 31 bp, Artificial Sequence
  Description of Artificial Sequence:  Enzymatic Nucleic Acid
tccagggcggctagctacaacgaagtcagcg

SEQ ID NO: 5432 - DNA, 31 bp, Artificial Sequence
  Description of Artificial Sequence:  Enzymatic Nucleic Acid
gctgcggcggctagctacaacgactccaggg

SEQ ID NO: 5433 - DNA, 31 bp, Artificial Sequence
  Description of Artificial Sequence:  Enzymatic Nucleic Acid
ttggctgcggctagctacaacgaggcctcca

SEQ ID NO: 5434 - DNA, 31 bp, Artificial Sequence
  Description of Artificial Sequence:  Enzymatic Nucleic Acid
gggttggcggctagctacaacgatgcggcct

SEQ ID NO: 5435 - DNA, 31 bp, Artificial Sequence
  Description of Artificial Sequence:  Enzymatic Nucleic Acid
tgccgggtggctagctacaacgatggctgcg

SEQ ID NO: 5436 - DNA, 31 bp, Artificial Sequence
  Description of Artificial Sequence:  Enzymatic Nucleic Acid
ggcagtgcggctagctacaacgacgggttgg

SEQ ID NO: 5437 - DNA, 31 bp, Artificial Sequence
  Description of Artificial Sequence:  Enzymatic Nucleic Acid
agggcagtggctagctacaacgagccgggtt

SEQ ID NO: 5438 - DNA, 31 bp, Artificial Sequence
  Description of Artificial Sequence:  Enzymatic Nucleic Acid
ctgagggcggctagctacaacgaagtgccgg

SEQ ID NO: 5439 - DNA, 31 bp, Artificial Sequence
  Description of Artificial Sequence:  Enzymatic Nucleic Acid
cttgaagtggctagctacaacgactgagggc

SEQ ID NO: 5440 - DNA, 31 bp, Artificial Sequence
  Description of Artificial Sequence:  Enzymatic Nucleic Acid
aggatggtggctagctacaacgacttgaagt

SEQ ID NO: 5441 - DNA, 31 bp, Artificial Sequence
  Description of Artificial Sequence:  Enzymatic Nucleic Acid
tccaggatggctagctacaacgaggtcttga

SEQ ID NO: 5442 - DNA, 31 bp, Artificial Sequence
  Description of Artificial Sequence:  Enzymatic Nucleic Acid
ccatcagtggctagctacaacgaccaggatg

SEQ ID NO: 5443 - DNA, 31 bp, Artificial Sequence
  Description of Artificial Sequence:  Enzymatic Nucleic Acid
gtggccatggctagctacaacgacagtccag

SEQ ID NO: 5444 - DNA, 31 bp, Artificial Sequence
  Description of Artificial Sequence:  Enzymatic Nucleic Acid
cgggtggcggctagctacaacgacatcagtc

SEQ ID NO: 5445 - DNA, 31 bp, Artificial Sequence
  Description of Artificial Sequence:  Enzymatic Nucleic Acid
gggcgggtggctagctacaacgaggccatca

SEQ ID NO: 5446 - DNA, 31 bp, Artificial Sequence
  Description of Artificial Sequence:  Enzymatic Nucleic Acid
ctgtgggcggctagctacaacgagggtggcc

SEQ ID NO: 5447 - DNA, 31 bp, Artificial Sequence
  Description of Artificial Sequence:  Enzymatic Nucleic Acid
ctggctgtggctagctacaacgagggcgggt

SEQ ID NO: 5448 - DNA, 31 bp, Artificial Sequence
  Description of Artificial Sequence:  Enzymatic Nucleic Acid
ggcctggcggctagctacaacgatgtgggcg

SEQ ID NO: 5449 - DNA, 31 bp, Artificial Sequence
  Description of Artificial Sequence:  Enzymatic Nucleic Acid
ctctcggcggctagctacaacgactggctgt

SEQ ID NO: 5450 - DNA, 31 bp, Artificial Sequence
  Description of Artificial Sequence:  Enzymatic Nucleic Acid
gtgtctgcggctagctacaacgatctcggcc

SEQ ID NO: 5451 - DNA, 31 bp, Artificial Sequence
  Description of Artificial Sequence:  Enzymatic Nucleic Acid
gctggtgtggctagctacaacgactgctctc

SEQ ID NO: 5452 - DNA, 31 bp, Artificial Sequence
  Description of Artificial Sequence:  Enzymatic Nucleic Acid
ctgctggtggctagctacaacgagtctgctc

SEQ ID NO: 5453 - DNA, 31 bp, Artificial Sequence
  Description of Artificial Sequence:  Enzymatic Nucleic Acid
agggctgcggctagctacaacgatggtgtct

SEQ ID NO: 5454 - DNA, 31 bp, Artificial Sequence
  Description of Artificial Sequence:  Enzymatic Nucleic Acid
gacagggcggctagctacaacgatgctggtg

SEQ ID NO: 5455 - DNA, 31 bp, Artificial Sequence
  Description of Artificial Sequence:  Enzymatic Nucleic Acid
ggcgtgacggctagctacaacgaagggctgc

SEQ ID NO: 5456 - DNA, 31 bp, Artificial Sequence
  Description of Artificial Sequence:  Enzymatic Nucleic Acid
cccggcgtggctagctacaacgagacagggc

SEQ ID NO: 5457 - DNA, 31 bp, Artificial Sequence
  Description of Artificial Sequence:  Enzymatic Nucleic Acid
agcccggcggctagctacaacgagtgacagg

SEQ ID NO: 5458 - DNA, 31 bp, Artificial Sequence
  Description of Artificial Sequence:  Enzymatic Nucleic Acid
cgtagagcggctagctacaacgaccggcgtg

SEQ ID NO: 5459 - DNA, 31 bp, Artificial Sequence
  Description of Artificial Sequence:  Enzymatic Nucleic Acid
tgggacgtggctagctacaacgaagagcccg

SEQ ID NO: 5460 - DNA, 31 bp, Artificial Sequence
  Description of Artificial Sequence:  Enzymatic Nucleic Acid
cctgggacggctagctacaacgagtagagcc

SEQ ID NO: 5461 - DNA, 31 bp, Artificial Sequence
  Description of Artificial Sequence:  Enzymatic Nucleic Acid
tgggccgcggctagctacaacgaccctccct

SEQ ID NO: 5462 - DNA, 31 bp, Artificial Sequence
  Description of Artificial Sequence:  Enzymatic Nucleic Acid
gtgtgggcggctagctacaacgacgcccctc

SEQ ID NO: 5463 - DNA, 31 bp, Artificial Sequence
  Description of Artificial Sequence:  Enzymatic Nucleic Acid
ctgggtgtggctagctacaacgagggccgcc

SEQ ID NO: 5464 - DNA, 31 bp, Artificial Sequence
  Description of Artificial Sequence:  Enzymatic Nucleic Acid
gcctgggtggctagctacaacgagtgggccg

SEQ ID NO: 5465 - DNA, 31 bp, Artificial Sequence
  Description of Artificial Sequence:  Enzymatic Nucleic Acid
gtgcgggcggctagctacaacgactgggtgt

SEQ ID NO: 5466 - DNA, 31 bp, Artificial Sequence
  Description of Artificial Sequence:  Enzymatic Nucleic Acid
agcggtgcggctagctacaacgagggcctgg

SEQ ID NO: 5467 - DNA, 31 bp, Artificial Sequence
  Description of Artificial Sequence:  Enzymatic Nucleic Acid
ccagcggtggctagctacaacgagcgggcct

SEQ ID NO: 5468 - DNA, 31 bp, Artificial Sequence
  Description of Artificial Sequence:  Enzymatic Nucleic Acid
ctcccagcggctagctacaacgaggtgcggg

SEQ ID NO: 5469 - DNA, 31 bp, Artificial Sequence
  Description of Artificial Sequence:  Enzymatic Nucleic Acid
cctcagacggctagctacaacgatcccagcg

SEQ ID NO: 5470 - DNA, 31 bp, Artificial Sequence
  Description of Artificial Sequence:  Enzymatic Nucleic Acid
actcaggcggctagctacaacgactcagact

SEQ ID NO: 5471 - DNA, 31 bp, Artificial Sequence
  Description of Artificial Sequence:  Enzymatic Nucleic Acid
acactcacggctagctacaacgatcaggcct

SEQ ID NO: 5472 - DNA, 31 bp, Artificial Sequence
  Description of Artificial Sequence:  Enzymatic Nucleic Acid
ccaaacacggctagctacaacgatcactcag

SEQ ID NO: 5473 - DNA, 31 bp, Artificial Sequence
  Description of Artificial Sequence:  Enzymatic Nucleic Acid
ggccaaacggctagctacaacgaactcactc

SEQ ID NO: 5474 - DNA, 31 bp, Artificial Sequence
  Description of Artificial Sequence:  Enzymatic Nucleic Acid
gcctcggcggctagctacaacgacaaacact

SEQ ID NO: 5475 - DNA, 31 bp, Artificial Sequence
  Description of Artificial Sequence:  Enzymatic Nucleic Acid
atgcaggcggctagctacaacgactcggcca

SEQ ID NO: 5476 - DNA, 31 bp, Artificial Sequence
  Description of Artificial Sequence:  Enzymatic Nucleic Acid
ggacatgcggctagctacaacgaaggcctcg

SEQ ID NO: 5477 - DNA, 31 bp, Artificial Sequence
  Description of Artificial Sequence:  Enzymatic Nucleic Acid
ccggacatggctagctacaacgagcaggcct

SEQ ID NO: 5478 - DNA, 31 bp, Artificial Sequence
  Description of Artificial Sequence:  Enzymatic Nucleic Acid
agccggacggctagctacaacgaatgcaggc

SEQ ID NO: 5479 - DNA, 31 bp, Artificial Sequence
  Description of Artificial Sequence:  Enzymatic Nucleic Acid
ccttcagcggctagctacaacgacggacatg

SEQ ID NO: 5480 - DNA, 31 bp, Artificial Sequence
  Description of Artificial Sequence:  Enzymatic Nucleic Acid
cactcagcggctagctacaacgacttcagcc

SEQ ID NO: 5481 - DNA, 31 bp, Artificial Sequence
  Description of Artificial Sequence:  Enzymatic Nucleic Acid
ccggacacggctagctacaacgatcagcctt

SEQ ID NO: 5482 - DNA, 31 bp, Artificial Sequence
  Description of Artificial Sequence:  Enzymatic Nucleic Acid
agccggacggctagctacaacgaactcagcc

SEQ ID NO: 5483 - DNA, 31 bp, Artificial Sequence
  Description of Artificial Sequence:  Enzymatic Nucleic Acid
gcctcagcggctagctacaacgacggacact

SEQ ID NO: 5484 - DNA, 31 bp, Artificial Sequence
  Description of Artificial Sequence:  Enzymatic Nucleic Acid
gctcaggcggctagctacaacgactcagccg

SEQ ID NO: 5485 - DNA, 31 bp, Artificial Sequence
  Description of Artificial Sequence:  Enzymatic Nucleic Acid
acactcgcggctagctacaacgatcaggcct

SEQ ID NO: 5486 - DNA, 31 bp, Artificial Sequence
  Description of Artificial Sequence:  Enzymatic Nucleic Acid
ctggacacggctagctacaacgatcgctcag

SEQ ID NO: 5487 - DNA, 31 bp, Artificial Sequence
  Description of Artificial Sequence:  Enzymatic Nucleic Acid
ggctggacggctagctacaacgaactcgctc

SEQ ID NO: 5488 - DNA, 31 bp, Artificial Sequence
  Description of Artificial Sequence:  Enzymatic Nucleic Acid
cccttggcggctagctacaacgatggacact

SEQ ID NO: 5489 - DNA, 31 bp, Artificial Sequence
  Description of Artificial Sequence:  Enzymatic Nucleic Acid
cactcagcggctagctacaacgaccttggct

SEQ ID NO: 5490 - DNA, 31 bp, Artificial Sequence
  Description of Artificial Sequence:  Enzymatic Nucleic Acid
ctggacacggctagctacaacgatcagccct

SEQ ID NO: 5491 - DNA, 31 bp, Artificial Sequence
  Description of Artificial Sequence:  Enzymatic Nucleic Acid
tgctggacggctagctacaacgaactcagcc

SEQ ID NO: 5492 - DNA, 31 bp, Artificial Sequence
  Description of Artificial Sequence:  Enzymatic Nucleic Acid
aggtgtgcggctagctacaacgatggacact

SEQ ID NO: 5493 - DNA, 31 bp, Artificial Sequence
  Description of Artificial Sequence:  Enzymatic Nucleic Acid
gcaggtgtggctagctacaacgagctggaca

SEQ ID NO: 5494 - DNA, 31 bp, Artificial Sequence
  Description of Artificial Sequence:  Enzymatic Nucleic Acid
cggcaggtggctagctacaacgagtgctgga

SEQ ID NO: 5495 - DNA, 31 bp, Artificial Sequence
  Description of Artificial Sequence:  Enzymatic Nucleic Acid
aagacggcggctagctacaacgaaggtgtgc

SEQ ID NO: 5496 - DNA, 31 bp, Artificial Sequence
  Description of Artificial Sequence:  Enzymatic Nucleic Acid
gtgaagacggctagctacaacgaggcaggtg

SEQ ID NO: 5497 - DNA, 31 bp, Artificial Sequence
  Description of Artificial Sequence:  Enzymatic Nucleic Acid
ggggaagtggctagctacaacgagaagacgg

SEQ ID NO: 5498 - DNA, 31 bp, Artificial Sequence
  Description of Artificial Sequence:  Enzymatic Nucleic Acid
cagcctgtggctagctacaacgaggggaagt

SEQ ID NO: 5499 - DNA, 31 bp, Artificial Sequence
  Description of Artificial Sequence:  Enzymatic Nucleic Acid
gcgccagcggctagctacaacgactgtgggg

SEQ ID NO: 5500 - DNA, 31 bp, Artificial Sequence
  Description of Artificial Sequence:  Enzymatic Nucleic Acid
ccgagcgcggctagctacaacgacagcctgt

SEQ ID NO: 5501 - DNA, 31 bp, Artificial Sequence
  Description of Artificial Sequence:  Enzymatic Nucleic Acid
agccgagcggctagctacaacgagccagcct

SEQ ID NO: 5502 - DNA, 31 bp, Artificial Sequence
  Description of Artificial Sequence:  Enzymatic Nucleic Acid
ggtggagcggctagctacaacgacgagcgcc

SEQ ID NO: 5503 - DNA, 31 bp, Artificial Sequence
  Description of Artificial Sequence:  Enzymatic Nucleic Acid
cctggggtggctagctacaacgaggagccga

SEQ ID NO: 5504 - DNA, 31 bp, Artificial Sequence
  Description of Artificial Sequence:  Enzymatic Nucleic Acid
aagctggcggctagctacaacgacctggggt

SEQ ID NO: 5505 - DNA, 31 bp, Artificial Sequence
  Description of Artificial Sequence:  Enzymatic Nucleic Acid
ggaaaagcggctagctacaacgatggccctg

SEQ ID NO: 5506 - DNA, 31 bp, Artificial Sequence
  Description of Artificial Sequence:  Enzymatic Nucleic Acid
ctcctggtggctagctacaacgagaggaaaa

SEQ ID NO: 5507 - DNA, 31 bp, Artificial Sequence
  Description of Artificial Sequence:  Enzymatic Nucleic Acid
agccgggcggctagctacaacgatcctggtg

SEQ ID NO: 5508 - DNA, 31 bp, Artificial Sequence
  Description of Artificial Sequence:  Enzymatic Nucleic Acid
gtggaagcggctagctacaacgacgggctcc

SEQ ID NO: 5509 - DNA, 31 bp, Artificial Sequence
  Description of Artificial Sequence:  Enzymatic Nucleic Acid
tggggagtggctagctacaacgaggaagccg

SEQ ID NO: 5510 - DNA, 31 bp, Artificial Sequence
  Description of Artificial Sequence:  Enzymatic Nucleic Acid
tcctatgtggctagctacaacgaggggagtg

SEQ ID NO: 5511 - DNA, 31 bp, Artificial Sequence
  Description of Artificial Sequence:  Enzymatic Nucleic Acid
attcctatggctagctacaacgagtggggag

SEQ ID NO: 5512 - DNA, 31 bp, Artificial Sequence
  Description of Artificial Sequence:  Enzymatic Nucleic Acid
tggactatggctagctacaacgatcctatgt

SEQ ID NO: 5513 - DNA, 31 bp, Artificial Sequence
  Description of Artificial Sequence:  Enzymatic Nucleic Acid
ggatggacggctagctacaacgatattccta

SEQ ID NO: 5514 - DNA, 31 bp, Artificial Sequence
  Description of Artificial Sequence:  Enzymatic Nucleic Acid
ctggggatggctagctacaacgaggactatt

SEQ ID NO: 5515 - DNA, 31 bp, Artificial Sequence
  Description of Artificial Sequence:  Enzymatic Nucleic Acid
tggcgaatggctagctacaacgactggggat

SEQ ID NO: 5516 - DNA, 31 bp, Artificial Sequence
  Description of Artificial Sequence:  Enzymatic Nucleic Acid
acaatggcggctagctacaacgagaatctgg

SEQ ID NO: 5517 - DNA, 31 bp, Artificial Sequence
  Description of Artificial Sequence:  Enzymatic Nucleic Acid
tgaacaatggctagctacaacgaggcgaatc

SEQ ID NO: 5518 - DNA, 31 bp, Artificial Sequence
  Description of Artificial Sequence:  Enzymatic Nucleic Acid
gggtgaacggctagctacaacgaaatggcga

SEQ ID NO: 5519 - DNA, 31 bp, Artificial Sequence
  Description of Artificial Sequence:  Enzymatic Nucleic Acid
cgaggggtggctagctacaacgagaacaatg

SEQ ID NO: 5520 - DNA, 31 bp, Artificial Sequence
  Description of Artificial Sequence:  Enzymatic Nucleic Acid
ggcagggcggctagctacaacgagaggggtg

SEQ ID NO: 5521 - DNA, 31 bp, Artificial Sequence
  Description of Artificial Sequence:  Enzymatic Nucleic Acid
aggagggcggctagctacaacgaagggcgag

SEQ ID NO: 5522 - DNA, 31 bp, Artificial Sequence
  Description of Artificial Sequence:  Enzymatic Nucleic Acid
tggaaggcggctagctacaacgaaaaggagg

SEQ ID NO: 5523 - DNA, 31 bp, Artificial Sequence
  Description of Artificial Sequence:  Enzymatic Nucleic Acid
gtgggggtggctagctacaacgaggaaggca

SEQ ID NO: 5524 - DNA, 31 bp, Artificial Sequence
  Description of Artificial Sequence:  Enzymatic Nucleic Acid
tggatggtggctagctacaacgagggggtgg

SEQ ID NO: 5525 - DNA, 31 bp, Artificial Sequence
  Description of Artificial Sequence:  Enzymatic Nucleic Acid
acctggatggctagctacaacgaggtggggg

SEQ ID NO: 5526 - DNA, 31 bp, Artificial Sequence
  Description of Artificial Sequence:  Enzymatic Nucleic Acid
gtctccacggctagctacaacgactggatgg

SEQ ID NO: 5527 - DNA, 31 bp, Artificial Sequence
  Description of Artificial Sequence:  Enzymatic Nucleic Acid
ctcagggtggctagctacaacgactccacct

SEQ ID NO: 5528 - DNA, 31 bp, Artificial Sequence
  Description of Artificial Sequence:  Enzymatic Nucleic Acid
cccagggtggctagctacaacgaccttctca

SEQ ID NO: 5529 - DNA, 31 bp, Artificial Sequence
  Description of Artificial Sequence:  Enzymatic Nucleic Acid
cccagagcggctagctacaacgatcccaggg

SEQ ID NO: 5530 - DNA, 31 bp, Artificial Sequence
  Description of Artificial Sequence:  Enzymatic Nucleic Acid
ctccaaatggctagctacaacgatcccagag

SEQ ID NO: 5531 - DNA, 31 bp, Artificial Sequence
  Description of Artificial Sequence:  Enzymatic Nucleic Acid
ttggtcacggctagctacaacgatccaaatt

SEQ ID NO: 5532 - DNA, 31 bp, Artificial Sequence
  Description of Artificial Sequence:  Enzymatic Nucleic Acid
cctttggtggctagctacaacgacactccaa

SEQ ID NO: 5533 - DNA, 31 bp, Artificial Sequence
  Description of Artificial Sequence:  Enzymatic Nucleic Acid
gggcacacggctagctacaacgactttggtc

SEQ ID NO: 5534 - DNA, 31 bp, Artificial Sequence
  Description of Artificial Sequence:  Enzymatic Nucleic Acid
cagggcacggctagctacaacgaacctttgg

SEQ ID NO: 5535 - DNA, 31 bp, Artificial Sequence
  Description of Artificial Sequence:  Enzymatic Nucleic Acid
tacagggcggctagctacaacgaacaccttt

SEQ ID NO: 5536 - DNA, 31 bp, Artificial Sequence
  Description of Artificial Sequence:  Enzymatic Nucleic Acid
ctgtgtacggctagctacaacgaagggcaca

SEQ ID NO: 5537 - DNA, 31 bp, Artificial Sequence
  Description of Artificial Sequence:  Enzymatic Nucleic Acid
gcctgtgtggctagctacaacgaacagggca

SEQ ID NO: 5538 - DNA, 31 bp, Artificial Sequence
  Description of Artificial Sequence:  Enzymatic Nucleic Acid
tcgcctgtggctagctacaacgagtacaggg

SEQ ID NO: 5539 - DNA, 31 bp, Artificial Sequence
  Description of Artificial Sequence:  Enzymatic Nucleic Acid
gtcctcgcggctagctacaacgactgtgtac

SEQ ID NO: 5540 - DNA, 31 bp, Artificial Sequence
  Description of Artificial Sequence:  Enzymatic Nucleic Acid
tgcagggtggctagctacaacgacctcgcct

SEQ ID NO: 5541 - DNA, 31 bp, Artificial Sequence
  Description of Artificial Sequence:  Enzymatic Nucleic Acid
ccaggtgcggctagctacaacgaagggtcct

SEQ ID NO: 5542 - DNA, 31 bp, Artificial Sequence
  Description of Artificial Sequence:  Enzymatic Nucleic Acid
atccaggtggctagctacaacgagcagggtc

SEQ ID NO: 5543 - DNA, 31 bp, Artificial Sequence
  Description of Artificial Sequence:  Enzymatic Nucleic Acid
acccccatggctagctacaacgaccaggtgc

SEQ ID NO: 5544 - DNA, 31 bp, Artificial Sequence
  Description of Artificial Sequence:  Enzymatic Nucleic Acid
acagggacggctagctacaacgaccccatcc

SEQ ID NO: 5545 - DNA, 31 bp, Artificial Sequence
  Description of Artificial Sequence:  Enzymatic Nucleic Acid
tgacccacggctagctacaacgaagggaccc

SEQ ID NO: 5546 - DNA, 31 bp, Artificial Sequence
  Description of Artificial Sequence:  Enzymatic Nucleic Acid
aatttgacggctagctacaacgaccacaggg

SEQ ID NO: 5547 - DNA, 31 bp, Artificial Sequence
  Description of Artificial Sequence:  Enzymatic Nucleic Acid
cccccaatggctagctacaacgattgaccca

SEQ ID NO: 5548 - DNA, 31 bp, Artificial Sequence
  Description of Artificial Sequence:  Enzymatic Nucleic Acid
cacagcacggctagctacaacgactcccccc

SEQ ID NO: 5549 - DNA, 31 bp, Artificial Sequence
  Description of Artificial Sequence:  Enzymatic Nucleic Acid
cccacagcggctagctacaacgaacctcccc

SEQ ID NO: 5550 - DNA, 31 bp, Artificial Sequence
  Description of Artificial Sequence:  Enzymatic Nucleic Acid
actcccacggctagctacaacgaagcacctc

SEQ ID NO: 5551 - DNA, 31 bp, Artificial Sequence
  Description of Artificial Sequence:  Enzymatic Nucleic Acid
tattttacggctagctacaacgatcccacag

SEQ ID NO: 5552 - DNA, 31 bp, Artificial Sequence
  Description of Artificial Sequence:  Enzymatic Nucleic Acid
ttcagtatggctagctacaacgatttactcc

SEQ ID NO: 5553 - DNA, 31 bp, Artificial Sequence
  Description of Artificial Sequence:  Enzymatic Nucleic Acid
tattcagtggctagctacaacgaattttact

SEQ ID NO: 5554 - DNA, 31 bp, Artificial Sequence
  Description of Artificial Sequence:  Enzymatic Nucleic Acid
tcatatatggctagctacaacgatcagtatt

SEQ ID NO: 5555 - DNA, 31 bp, Artificial Sequence
  Description of Artificial Sequence:  Enzymatic Nucleic Acid
actcatatggctagctacaacgaattcagta

SEQ ID NO: 5556 - DNA, 31 bp, Artificial Sequence
  Description of Artificial Sequence:  Enzymatic Nucleic Acid
aaactcatggctagctacaacgaatattcag

SEQ ID NO: 5557 - DNA, 31 bp, Artificial Sequence
  Description of Artificial Sequence:  Enzymatic Nucleic Acid
tgaaaaacggctagctacaacgatcatatat

SEQ ID NO: 5558 - DNA, 31 bp, Artificial Sequence
  Description of Artificial Sequence:  Enzymatic Nucleic Acid
ttcaaaacggctagctacaacgatgaaaaac

SEQ ID NO: 5559 - RNA, 36 nt, Artificial Sequence
  Description of Artificial Sequence:  Enzymatic Nucleic Acid
aggaguacugaugaggccguuaggccgaaaggaagu

SEQ ID NO: 5560 - RNA, 36 nt, Artificial Sequence
  Description of Artificial Sequence:  Enzymatic Nucleic Acid
ugaggagcugaugaggccguuaggccgaaagaggaa

SEQ ID NO: 5561 - RNA, 36 nt, Artificial Sequence
  Description of Artificial Sequence:  Enzymatic Nucleic Acid
ugaagcgcugaugaggccguuaggccgaaagucugg

SEQ ID NO: 5562 - RNA, 36 nt, Artificial Sequence
  Description of Artificial Sequence:  Enzymatic Nucleic Acid
gagccaccugaugaggccguuaggccgaaaacuguc

SEQ ID NO: 5563 - RNA, 36 nt, Artificial Sequence
  Description of Artificial Sequence:  Enzymatic Nucleic Acid
ugaagcgcugaugaggccguuaggccgaaaggaaga

SEQ ID NO: 5564 - RNA, 36 nt, Artificial Sequence
  Description of Artificial Sequence:  Enzymatic Nucleic Acid
gcguggacugaugaggccguuaggccgaaaggaugg

SEQ ID NO: 5565 - RNA, 36 nt, Artificial Sequence
  Description of Artificial Sequence:  Enzymatic Nucleic Acid
aguagcacugaugaggccguuaggccgaaagggagg

SEQ ID NO: 5566 - RNA, 36 nt, Artificial Sequence
  Description of Artificial Sequence:  Enzymatic Nucleic Acid
cugugggcugaugaggccguuaggccgaaaagugaa

SEQ ID NO: 5567 - RNA, 36 nt, Artificial Sequence
  Description of Artificial Sequence:  Enzymatic Nucleic Acid
augugggcugaugaggccguuaggccgaaaguggaa

SEQ ID NO: 5568 - RNA, 36 nt, Artificial Sequence
  Description of Artificial Sequence:  Enzymatic Nucleic Acid
ggugaaccugaugaggccguuaggccgaaauggcga

SEQ ID NO: 5569 - DNA, 18 bp, Artificial Sequence
  Description of Artificial Sequence:  Nucleic Acid Substrate Primer
aatccgtcgagcagagtt

SEQ ID NO: 5570 - DNA, 30 bp, Artificial Sequence
  Description of Artificial Sequence:  Nucleic Acid Return Primer
gcgcggcttacccttacccttaccctaacc

SEQ ID NO: 5571 - DNA, 18 bp, Artificial Sequence
  Description of Artificial Sequence:  Nucleic Acid Internal Control Primer
atcgcttctcggcctttt

SEQ ID NO: 5572 - DNA, 35 bp, Artificial Sequence
  Description of Artificial Sequence:  Nucleic Acid Internal Control Template
aatccgtcgagcagagttaaaaggccgagaacgat

SEQ ID NO: 5573 - DNA, 62 bp, Artificial Sequence
  Description of Artificial Sequence:  Nucleic Acid Standard Template
aatccgtcgagcagagttagggttagggttagggttagggttagggttagggttagggttag

SEQ ID NO: 5574 - RNA, 10 nt, Artificial Sequence
  Description of Artificial Sequence:  Enzymatic Nucleic Acid Stem Loop
gccguuaggc

SEQ ID NO: 5575 - RNA, 15 nt, Artificial Sequence
  Description of Artificial Sequence:  Nucleic acid substrate
  misc_feature (1)..(7): n stands for any a, c, g, or u
  misc_feature (9)..(9): n stands for any a, c, g, or u
  misc_feature (13)..(15): n stands for any a, c, g, or u
nnnnnnnynghynnn

SEQ ID NO: 5576 - RNA, 47 nt, Artificial Sequence
  Description of Artificial Sequence:  Enzymatic Nucleic acid
  misc_feature (1)..(4): n stands for any a, c, g, or u
  misc_feature (9)..(19): n stands for any a, c, g, or u
  misc_feature (25)..(31): n stands for any a, c, g, or u
  misc_feature (39)..(47): n stands for any a, c, g, or u
nnnngaagnnnnnnnnnnnaaahannnnnnnacauuacnnnnnnnnn

SEQ ID NO: 5577 - RNA, 15 nt, Artificial Sequence
  Description of Artificial Sequence:  Nucleic Acid Substrate
  misc_feature (1)..(6): n stands for a, c, g, or u
  misc_feature (9)..(15): n stands for a, c, g, or u
nnnnnnuhnnnnnnn

SEQ ID NO: 5578 - RNA, 36 nt, Artificial Sequence
  Description of Artificial Sequence:  Enzymatic Nucleic Acid
  misc_feature (1)..(7): n stands for a, c, g, or u
  misc_feature (16)..(18): n stands for a, c, g, or u
  misc_feature (23)..(25): n stands for a, c, g, or u
  misc_feature (31)..(36): n stands for a, c, g, or u
  misc_feature (1)..(8): 2'-O-Methyl
  misc_feature (12)..(12): 2'-O-Methyl
  misc_feature (14)..(26): 2'-O-Methyl
  misc_feature (28)..(29): 2'-O-Methyl
  misc_feature (31)..(36): 2'-O-Methyl
  misc_feature (9)..(9): 2'-deoxy-2'-C-Allyl
nnnnnnncugaugagnnngaaannncgaaannnnnn

SEQ ID NO: 5579 - RNA, 14 nt, Artificial Sequence
  Description of Artificial Sequence:  Nucleic Acid Substrate
  misc_feature (1)..(5): n stands for a, c, g, or u
  misc_feature (8)..(14): n stands for a, c, g, or u
nnnnnchnnnnnnn

SEQ ID NO: 5580 - RNA, 35 nt, Artificial Sequence
  Description of Artificial Sequence:  Enzymatic Nucleic Acid
  misc_feature (1)..(7): n stands for a, c, g, or u
  misc_feature (16)..(18): n stands for a, c, g, or u
  misc_feature (23)..(25): n stands for a, c, g, or u
  misc_feature (31)..(35): n stands for a, c, g, or u
  misc_feature (1)..(8): 2'-O-Methyl
  misc_feature (12)..(12): 2'-O-Methyl
  misc_feature (14)..(26): 2'-O-Methyl
  misc_feature (28)..(29): 2'-O-Methyl
  misc_feature (31)..(35): 2'-O-Methyl
  misc_feature (30)..(30): n stands for Inosine
  misc_feature (9)..(9): 2'-deoxy-2'-C-Allyl
nnnnnnncugaugagnnngaaannncgaannnnnn

SEQ ID NO: 5581 - RNA, 15 nt, Artificial Sequence
  Description of Artificial Sequence:  Nucleic Acid Substrate
  misc_feature (1)..(6): n stands for a, c, g, or u
  misc_feature (9)..(15): n stands for a, c, g, or u
nnnnnnygnnnnnnn

SEQ ID NO: 5582 - RNA, 35 nt, Artificial Sequence
  Description of Artificial Sequence:  Enzymatic Nucleic Acid
  misc_feature (1)..(7): n stands for a, c, g, or u
  misc_feature (29)..(35): n stands for a, c, g, or u
  misc_feature (1)..(8): 2'-O-Methyl
  misc_feature (13)..(16): 2'-O-Methyl
  misc_feature (18)..(35): 2'-O-Methyl
  misc_feature (11)..(11): Phosphorothioate 3'-Internucleotide Linkage
nnnnnnnugauggcaugcacuaugcgcgnnnnnnn

SEQ ID NO: 5583 - RNA, 48 nt, Artificial Sequence
  Description of Artificial Sequence:  Enzymatic Nucleic Acid
  misc_feature (1)..(8): 2'-O-Methyl
  misc_feature (12)..(21): 2'-O-Methyl
  misc_feature (32)..(37): 2'-O-Methyl
  misc_feature (44)..(48): 2'-O-Methyl
  misc_feature (9)..(10): 2'-deoxy-2'-amino
  misc_feature (22)..(26): 2'-deoxy-2'-amino
  misc_feature (38)..(40): 2'-deoxy-2'-amino
gugugcaaccggaggaaacucccuucaaggacgaaaguccgggacggg

SEQ ID NO: 5584 - RNA, 16 nt, Homo sapiens
gccguggguugcacac

SEQ ID NO: 5585 - RNA, 36 nt, Artificial Sequence
  Description of Artificial Sequence:  Enzymatic Nucleic Acid
  misc_feature (1)..(7): 2'-O-Methyl
  misc_feature (9)..(15): 2'-O-Methyl
  misc_feature (19)..(19): 2'-O-Methyl
  misc_feature (21)..(21): 2'-O-Methyl
  misc_feature (23)..(23): 2'-O-Methyl
  misc_feature (26)..(26): 2'-O-Methyl
  misc_feature (28)..(35): 2'-O-Methyl
  misc_feature (1)..(4): Phosphorothioate 3'-Internucleotide Linkage
  misc_feature (17)..(17): 2'-Deoxy-2'-Amino
  misc_feature (27)..(27): 2'-Deoxy-2'-Amino
  misc_feature (36)..(36): n stands for inverted deoxyabasic derivative
gugccuggccgaaaggcgagugaggucugccgcgcn

SEQ ID NO: 5586 - RNA, 15 nt, Homo sapiens
gcgcggcgcaggcac
